United States Patent Application Publication US 2025/0092353 A1 - sequence listing, part 3

SEQ ID NO: 16 - DNA, 698544 bp, Kazachstania heterogenica
  source 1..698544: mol_type = genomic DNA
atctttttttactctctattcccctgttcgaatcttctcccatgccttttttctactactatatttctcccttctctatcttttacttttccactgttcgaatccccatcgccgctttttttctcttttatttctttacaactcatcaataccttctactcttccaccgttcgaatcctttctgatgtcttttttctactactatatttctcccatcatcacttctatctcccactcttttcccctgttcgaatcctctccgatgccttttttctactactatatttctcccatctctatcttttactcttcccctgttcgaatcccaattgctgccttttctcttttatttctttactacccatctctatcttctcctcttcccctgttcgaatcctttctgatgccttttttctactactatatttctcccatcatcactttcattactattctcttttcccctgttcgaatcccaattgctgccttttctcttttatttctttatcactcatcaataccttctactcttccactgttcgaaccctctctcatgtcttttttctattactatatttctcccactatctcactactcatcaacttcttctacttcttttcattactcccttctcttactctcctctattcctcttttctattctctttatcctaatatcttcttttctctatctctccaaaactaaaatatctctaacttatcttctactactcaccaccaccctctcctactctctctacttcttctctcatccatactctcccctccccttttatacattttataccaacattcccattttcaccaccactaatctctccctttccccacaacactataattatccaacccttaccatatctaaaatctccttattcttacaacatacacactcactctatgacctttctttatcaaacactcttttattatcttgttaataataatcaaaacacaattatatttttcaacaagacactcaaattctgttcatgtataaacatgttaacttatctgtattatttctatacctttctaataatccacacctccaatttacatctctctatttaacacaaacaccactactctccatcttctcatcatctccccataccccttactactctttcatctgtttatttcttactttccctcttatatcacttatctatgttctaacacccagacaccctccttacctcaccacttattaccctgtactattctaccctttttcttcaaactacccatcataatataaatattatcattctctgtcatcacattatctatatatccatacatcactccctctctacacctattttcaccttaatctacttcacttgtttacttccctatgttctaacacccagacaccctccttacctcaccacttataaccgtgtaccaatcaactctttttcttcaaactacccatcataatatgaatattcacattctctgtcatcacattatctatatttccatacatcactccctctctacacctattttcacccgaatctactctacttgtttactcccctatgttctaacacccagacaccctccttacctcaccactttttaccctgtaccattctaccctttttcttcaaactaacccatcataatatgaatattcatattctctgtcatcatattatctatatttctatttatccttccatctcctctttattttcactctaatctactgtacttgtttactcccctatgttctaacacccagacaccctccttacctcaccacttttcaccctgtaccattctaccatttttcttcaaactaaccatcataatatgaatattcatattctctgtcatcatattatctatatttctatttatccttccatctcctctttattttcactctaatctactgtacttgtttactcccctatgttctaacacccagacaccctccttacctcaccacttttcaccctgtaccaatctaccatttttctccaaaccatccatcataatataaatattatcattctctgtcatcatattatctatatttctatttatccttccatcttctctatcttttcaccctaatctactccacttgtttacttccttatattttaacacccatacaccctccttacctcaccacttattcaccctgtaccaatctaccttttcccaagagatatcccattataatataaatattaacattctctgtcatcactattatctatatttttatttatccttccatctcctctttattttcagcttaatctactctacttgtttactactctatgttctaacacccatacaccctccttacctcaccacttttcaccctgtaccaatctaccttttcccaagagatatcccattataatataaatattaacattctctgtcatcacattatctatatttctatttatccttccatctcctctttattttcagcttaatctactctacttgtttactactctatgttctaacacccatacaccctccttacctcaccacttattaccgtgtaccattctaccttttcctaagagatattccattataatatgtatatttaccttctctctcaccatattatctatatttccatacattcccccatctcctctactacttctctgccctcatttacctcctctcacaatacctatactcacccctactcttctactctcacacatcttcttctctttcaatatattgtagtatttgcctttctctgccttttttatgtttgtttcccactcttgtaatctcacacatttcattttaacgttcttgtcacttttcttaatcttcactgttttcaagaaaattataaatttacttgttaggaagatttatacagaaaccctagaaaatatatttgggagataatctcatacaacagcatcaatgttcaatatcgtcgtagccctgcatctcatttaagaggaagctattcttttcttgtggctctttgggttttaccatatcttttattacgttcttttatatagagaagtaagctgataatatgcttttaaggggtataactgataaatacatatctttaatactttctaagagtatataccgtatcactacattttggcccctacgcacctttcttcccccactatccgtttgttccattattcgaaatatccttgtcccctatacatagatgtccatgttatctatattggagacaccaccacattactacatcagccaatattttttgtcttgtaaaaaataaattaagattagattattcatatctggacttatagtatgtataattatcatacacagaagaagtattagtatactattattattgatttaacagacccactctatcacaatgtctaacccaccaccgatatgaataatctatccatttcttcaaatagtttttatatcttgccttattgcatgctgtaactgagctcaccagaaataaaataaaattgaaaacgcctgaaacatcaactgtccaatgttccagtaatgttttaagaaaattagaaccaaaataaatcattatatttcacaagggtgtaacatgacactagaagaaagagaagggtaaaatatgtgtaacaattgacaacagatgatcaatatttttaagactctcctggtgcatttcagatatatatacattaaaggtcacttggatcatgtggaatctttagaggcaagacaaaatacatttgaaagttagaagtatggccttaaaaagtccatagaactggaataattcattggaacaatttacgaattctattggtctgcatgactttatttattctcctggtttatttgtgttcgaagacaaatcaattatgagagctgtgtatgttgctgatattttagatcaacatagactattctaaaaaacaagtttgctttaaaagaattgggttttatgaaacacgatatactagaaacgggtctctcaggtttagatttaaattataacagagaaaacggaaccatacagttgcatattacaagatatattgaaaaatgtttgaagaatataaagagattgtatctaaatagaaaaaaactaatagcgtacctaaccttcataagtatgctatatatcccaaaacacataaattggtcatggagaaatctacattaaaagaaaaaataaaatggcttcaagtattgattggaaaactcaattatattagaacaagaggaagattagatatagaatttgctttaggcaagctgttacgtctagtattgttccctcatcctaaagtaattaaagcagtcaaaacattgttgaagtatgttaatgataccagatatataagaagcgacgaggagaataaattggacatcacagtggttgcagatgtatcattgggatctgagtttgacgtggtgttatcgtatggattggtaaaaatttttatgatggtttttccaaaaaatccactatagtttgtgggtcatcagcagaagctgaactggatgctccaaccatgggggaagatcaagctgttttattaaaatgtaaaataaaaggaatctttaaaatataaatacaaacattaatgtaataacagattctacaccagccattgattgactcaaacaggactactttaaaacacgaacaaaattcataggactcagactggaaaaatcaaaagaagaaacacaagataggtctattgatacatttaaaataaaaagggaaaataatatagcagacccttttactaaagagactacgtggggaaacttctctagaataattaacattttaaagggtgatatcaagccagaggatgtgttttgtatgactgaataaggaaagtagcattactttgagtaaaactgggttcagtcatgaaagcttatgaaacactctttacggggtatgagaacatagaaagtatgtctattaggtttctttactaaagactcttttagtatcttgttaataatattcacaagagaaatatatttttcaagaagagagatcattttatatttgtatatatcatattatataattacgtatattatttttataggtgtttaataaaccacacatccaatctactaacaacttaagtcatcacactattaactacaaatgccactactttccaacatttctcatcccattttctatatttatcacttcaaccttaatttactttcttcttaacatccaccctgcttaattttaaacctctgcctgttttcttttcttcttttctatttactccctcatattcccgctatcattggcctctactgccccctcacacctctcccattttactctattcttctcccttcacatccacttaattcttattctttatatcctgctctcgcttattttatatatctcaaactgctgtaattattaccatcagcattgtatattaaacaacttttttgttaattaagcagttattatggcaataatgttatatgtggtgtatcgatgcataaaagaacaagatgtaagaagatacattggttacttgcatacaacacatatgtacaaagagaagactaaaccaacatataaacaaaatatctaatctgttcatccattaaggtcacaatcatccactacaaacattccctttacttccatatcagctaagtatccttagagtagaatgtcttttacacagcaaccatcaatctttttcatccatcctgatctacattgtccacttaatttcaaattatctatccaatatcctaatactctcccttctcttccttgcccatcctgtttttacaactctaacaccactcgccccattctaatccacatatccttgtcctctctctaccactgacttacttctactatcttgcttctcatctcaatagctctttttactatatatcttctcttcttacaatactttctactccatccctctctaatattcatttcacttttcatactcacatcaccaagcaatcttacatatatttatactgccaccaatatcccattgtaagcatttcttcattattacatccatcaatattgtttgtgtctccttgctaaagtattattctgcaatcacccctatttccaatgtaatcaatatttcgttttatgtttatgtattttatgattgtacaatgcttcactgttcctctatatttctgcactatttttaccgttctcattatctcatccacaacacaacactctataacatcaggaatactatcaatctttgtatataatagacatatacaatctctaaataataccacaatcacttaattatctgccatcaacttctccaattatatgataagagagcaccaaagaaccgggcacataaggtaagctcattgagtactgttgaaggacaggtgttgacatattacccacactcaatcaaaactcactaaattttttatacttactcaacacatacaacctacaaataattctttttacccatcactttatgcacataccatctgtattatttaacatagtggccaaatacttataaatacacatttcatactgctccctcatgacatgtaagttgtcacccacaccttgtctatgtcatacgtggcattatatgttctctgctgtttatactaacatatcacaactgctccaattctatcttctcttgctcttattaaaaatacctttactcgcttctctatactaaaagttactttattttatctctatttcatatcactccaaaaagagttcccctgtttagaaactctaacactagtataccaccactctcccatctcttctaaatattaaatcatttccatgtttactccacctcttccaccgttcgaaccctcaccgtcaccttttctctatcactagtactctctcttaacacttcagagatacatcctttatagacatcactatactttgtatatgtcgattctttttcttttatcctttgacattttgtttacattattctattacttcatgctactgttttctttgatttattcttctccctttgtatatttttatccccacaatactataattatcgaactcttaccacaactaaaatatcattattgactatgcttaatcctctacaatctgtcgtcaccaccaatctctctattgtatgtttcttgtatattcatcattgctgttccatcaacagtatcgattcacaaacaccataagtgaccccactctgacgtttcacaataggaatatctgtgttctcttatcactttacaataatctagcccatcttacagtcgtaaaaatacatcactgaaagtaatattttatcatgttcacaaaggtacacatcccgtagaattgccttattgcttagctctataataattattctataaccttcttatgtctgtcatactatattctctaagcacacataaaaatatgttttaggtaaacctgtacaagactattctttatttttcaaatgaatctttgtatagcagctagatagacatgtacacaaagtactgtacacacaccttcaaacacaacagtagcaaaaggatgaaacgaaactaacgttgatgtattcctatgcattaactcataaacattgaaaattgtctcaacctcatatcctgctaagatttaggagctgtacagtaatgatcgttataacagaacataaaaacataaacaaactaatatcacaccctgttggcataatgtctctgtattgatatctctatgaacattttctttaggttaacgaattacaattccatattgctaccattgtaagttctcagatacactagcatgtcagtagtactctaaatctcttttcttccacttatctaatacacaacacatatcaatacacaatctaattcttttcattatatatatgtttttataattctctgctcgtactacaatcagtttacactgccatccataaaatactacttgacattttcatctggcaattatgctaacactcatctgtcctcactgctaccttttttctaaatatccccaacattcctcccttatagtcttcactacactctcttatattttcatctttctcttctattctttgatactttgttggcatctcctcaccactccatgctatcgtgctttttcttttattaccctgctcatttgtacatttcttaccccccctacgttatgattatactcctatactgctatgtacaataaatatcttttctcctaatattttatgcttctaataatataaataacatcaatatattagtttacacccatatcccaccacttgtttacgttatttgacaattcactctaagcaccatgtttatccccactctcatttctaccattcgaaccccactgctatcctttttctcaccataacactgtctcttaacaacacacacatacctttcatatacttcaccttacccttcattttatgttattctattcttcatctattactctctcctttatacatattttaccctcttccctactctactactagacacttatatagttttccaaaaataaatacgtcttctcttatttcctgacactttcaataatacaagtaacatcagtgtatcatataacactaggatactaccattttcatattttatctactatttccatcctcactccacttcttctaccattcgaaccctcatcattaccttttctctgtcagtgaaattttctccatcaataattcatagacacatcctttatagaccttaccttattctatcacattctattttatactactttatcatctatattatcgtgttcatttatacatttcttaccctcttcttcacaatacactcacacttctagatattttagtaaagttaatttctcttaccttacatccatacattattaaaagtaacataacattaatttattatctatctccaagatcctactatatctctattaccagtactgtttctctcaccattcctagatacaccatctatagtgttcaacatactctcctatgattctattattctgtattgtctcaattattcttgttatcatttgtttgtttccagttatactgtattttcctcctttatacctttcttactctcttctctaccatatttccatacttttgtaagaataaattctgcttacctcaattgtttgcacataactagtaaaaataatagtaatttatttttagcttccacattatgataccaatctggtcattgattataaataatagttgatctatgtgtgatagtagtaataattcagtggaatagttataggatataacttcactctagttctctgaatgtaatattaatatatatatctaatctactagaactaagtactgtgtgcagaatatctcttcgttatttaatactcatttgggttgttcttggttcctctctttcactcatgtttgtgagttttccaaaagagaatcttgggaagtattgctaaccctaatttttctaaaccaaaccctaaacaacaatcaagggatattactttttctaacgttatcttccactgtacacccatatagctttgtagaaattaattttcttgcctcaacctaggatacttttaaagaaacaccaatttattattgtggactcatatattaccatgtttttcttcacttgtaaaatactttaactactatttctgttcccgctctacctctactactgttccttcaatgaactttagacaacccttcgtagacttaccttactccctcaaacgaataatctttctctcttgttatcttggtccttacattactttattactatatatattatttttttaatctactactctcccgctttaatatactccatacttctatgtattattacaaaattgaaatcctcttatcttaacattggacatctgtgctttaatactcgactctttaaatctacattctatatgtttttttatttcttctgtctgtacatactatacacatatacgtacatgttgtatatgaataactgaacctcttttatttatagatctgaacacccacatataatcttgacatcatcataaaatatttaatatccaataattgtgacaataattctagcacatgacatcttatattttaaaaaaattattggtctactatctaacagtaatatcctacagttttctttttcatcgtttgaaccctcaccgctatcttttctctcaccctaacagtctctcttaataattcatagatccactctttatagacattaccattcctcccatacgtcaattatctttcttttagtctctaatattttgtttttactactttcttctttcatacattttataccctagtctctgattttactgctattaattcagccctttcccaacaatacaataatttccctctgtacttccccgattatttttttatactattagtaatatttattttcttctatttaccacctctcaatactcaactaattcacacatcttcttcttcacaattcctatgttttgaaagagcactagtattaatctaatattatcacaatttatgagtcaagtaaatggtatttctgccttattaaaagcaacagatgtaagatatattatgtttataaataggtacaagctgaatcttctttatttatttatgattattttcaacaatgtagtaaaaacagtctttactaaagaaacctggtgattatagcctctacactctatcttttttcctcaaagcttttcaaaaataattcaaaatattacccatccactacagtcactcaccgtcttttcctcttaactaatattaccctctaatctggatattcttctttccttatatcacttaataatttttcctatcaccaatttcaaatttacttctttgaatcctttagtaatatcaacacatatatgctgatatattgtcccctaatatccatatttactaacttttaatgttacaaattgacaaccactatttttctgttccatctatagttctctaatgattatttcaaaaataaaaacaacaacccataatccttcaattttcttgaatattgattaccaccctctctatttatccacatctttagatatccctaatatttaaacttggaaatatgttattcaatatatatgcataatattaaataaaaacacattatattacaaattgatttttgtttattttgtacatacacaagaagtgttgtcaataaaaactttcctgtctcgattttgatattttacttgctttgaatttcaataaaacgccatatcatacagtaaacaatatgttaccactccaaacaaccagtgtttcatcttcagtcataaaaaactttcttgtccagatgaattcttacctagtcatcatgataatacttcttactaatatagtaaatactgtttcttatttgagtagtactctagtaataattggtttgaacattatgaaatcattatactgatgtcttttatcatataaatttctcgaaccctcattagcttttactttaaactccatttggactacaacaaaaatatcttttttatagatatttctacactctcctatgttcccattttatgttattctctgttattttctttatattactccattattttcttcttcttcttttatctaatactctccctatcttgtacacttaacacccacattactactttaatctcttctagatttacgttattctctttcttttttattatcaactatatacattactcacaacattagcctcattctctactaatcctctaattccattactctatcatctgcttttctattttatttttgtttatgcccacaactctctttttagattacaatgctctttgctaatttatacttttctatcttctgcctattttccatttttactttattctatttttattttgttactaattcctatgtctacctcatcattaatattgtttaacttacatcttttattactcgtactacttaaaatccattctttttcttgccttctttttctttacctgcctatgtattgtttcttatattctacagccttattccttatattcaaatattctgtattgttatgtcaatattacaaacacttcttttttatatctgctcttagtatttctcccatggcattaatccaattatcatcgatttcacttgtttattatatttagagaactatttatactctttattttattacaaactccatcattattcttaatattatttggatgtcatatatttacatcacctgctcgtattaccataatatagtaaattgtcaatataatatatcaatcatctcacctattttgaatattacataaccaacactaaatcaacaacgtttttactattactatattcgatattataacaatcttattccatatatatcaaccctagtcaaataattcaagttacttcaacaattattttaccttattaatatgtatctttgactaacaatacttctaaaaataccaaattccactcttacctatttcttcttatctttacacaatatcctcaattattaatataatgtattgagaattggattatctgtacttagtaatttaattctatattctattactccttatacattaaatcaaccatttgcttagatcatgatataacatgtattttattgtatgtgtactcaacacgtttgttaaagttgaagcactatcattatccaagttcttaacatcattaacttatcagtatcatatataatactatactactaataataaatcagaaatattattatatgtttttataaaacacgatctttgtttagattaagtatttattatttaaaacagtaatgtaaatataaagatttaattacaaattgcaatcatatataaataaagattattgctagcattttgttaacaaactacaaaagtaaccttagccaatggtcaaagttaagataactaatatctatatcacacaccggtgtaaatataaagaattatcaaaagatatatttaattacttattggaatgaaatccatgtgtaattaagattatagttaaatccacacaataatcttgataaataaatgtatcagaaggcgtaattgcacaatgaatactaaaaataacaatatctacaaatgattaacaatctcaatagtaagtttagataataatctgttgacattaagaaacaaaaaccaaactagcaaaacacatttgggttctgtgttgtttagtagtaagcaagaaatagtttatgtacatattataaaataatataaaacttaaggcatctggagaatatattagttataattaaactcaacaaaaacagttttttatactcaagtagtagaacacatagtttaattcgataattaaaagtgtcacattgtgatatttttctcatggatatgtcaataaacaaaataaaacaccaaacaagaattatagcacaataaatattctaactgttttatactatgtacttatattcagaaacatacatactttattgcttaattatactttcagttgtatacaaaagtgtctccaggtatcatatacattagttaaactgaagttactgctgtggtcttgttaatattcttctatgtatttcactcattatatataattataaggacagaaagtattattattatcaaatatttagatgtatcatcaaatatatcaaatggtaatctattatttccaacatctaaattattaaacctggtgtctctctcgtgcaatttaattcttaatttatatgttgctttactgaatccttaaaacttaaattaaattattctgattattaaatacacattcacttattcagaaagtagtattccttatattcttatatataatacaaatttattttgtttactctaccaatcttcataatttcccctcctacattttactgtgtatacagccactcgctattcccagactaagtcaatataatgatgtaaacatttttcacagagatgtatacatcaattatatccatgtcctgttgtaatcctatcattatcactatcaacttagtatcatccccatgtgatcaattcaaggtatcaccactaatccagcctatttaaatctttttacggtacctcttggaaatgttattaatatatctggtgtattacttccagtattaagctacctaaattaaataatattattatcattacgacctattattacccatatatgattatatacagaaaggagataatagttaggttatctaccgtaacaatttctgtcacttgtaacaaacaggatattctacatcatatattgaatatatatgaataattaataattatagcttcttttttctatagaattctacactatggcaccatctcacatttaaaacctatccatattatctgcatatctcaaccctaacaagccaaataacatattatgactgttgatgacagattttaatatgttgctactaacatataaaagtatcaaatgttctatctttccatgataattgttaatacttcttcttacttttaatcattttgatataagtaaacaatcctctccttcatatacctgcttttctctgaccactccctttataaaatattatattatattaatcatactaatcaaaactatttatattaatatgggaacttccaaatttagttacttaatctgtttaaaattatttatgttccaacagaaatatattaaataaataatttttattttattaaccttaaaaaacctacagctttttcactggaaaattatcacccttaatatattttattgaacaaacactatactctgctactatagaatataaatgtgttttagaaagaaattaccaaacattaatctaaaattacattagcatctggaataatacttcaaagtggcaggtcttttatcttccttatataaatgttacctttaataagtggtcaattatagtttgatacttcatccaataaatattatgttgtatgaattacttaattacacaactgttttatctctagtccagcccaaattgaaaatttcgttttcgtatatattcaaaaaaagattctctgttgccttaccacctaattttgttaaacataatatgtgctaattatttcatccctgaatagcatatgtttcgattatcatgttcttttctgaacatttatttgataaatctcatatactacaagaatattggctaatattgcaactccattttaatactacctttaaaactcatccatattgaaagggcgcttagagttgtcacaactgggaacaacttgaatcttgctcaatcaaaatattacttacggtacattaaatatcatgcaaatgactagagttaatctagtttaacatataacttaatacatcttataatattaaataataattattgtattaaccgttacataatattatttcctttttctaaaatattttttattagctcttactatatcttcgtataatattaaatactacaatttttaatttttctattagataataaatgctacgctatcatatgtttattaactacatctctattcactttaattatacatacaataaattattatacttccatagagtgtatccccataatactaagatgtgcactgagtgttgtttatatctaagttatagttatgcaatatatagacacacatctcttaaaagtacaattaatcactaatctaatgataatggttcttttaagcaagatagatagtaataactaatcataataaattattagctatttatcttatactatatcaagtatcatattttggcatgaaccaatgctgtattatgcaatataaataatacttaactgtatttatatgagcgtaaaatagttataccaacatctttaagtagataaatgactagaaatataacatatatttattatatcttcaggttttattttgtattgtcttgtttactaatttataataccatcataaatatgtcattaatatgctggaattatatatcgcctgtttgcaaaacaaaagaatatatcaaagaggaaaaatatttgttctgcacattcaatattacagagataagatcaaacagaatgaaaataaattaatacattatgaaaaattgccaaaaggtaaacatatataagtagacgactttacttattaatttccaatatggatgaataatttatatacattctatcatttgtttcttttgtatttatataattattaattcccaattgagaaatcgaggaaaaattactctacatatcaacataataataatacacaataataacatatagtatgatcaccgacgctaaagacatgtatactaatattattcatctagaggatagatgatgttagaatctttacattaaaaatattactataataggaataatacaaggcattttctttcttcctcatgtaatcgtgaaaaggcagtgattatattaaggaccagtaaattttttattttttttaggttcaatatacccttgggatttatagatactaagttatttgtccaaattacttcattttgaatggcaataaaataaattaatctgcactcttattttttcatttttgttttctcaggtgcaatactttcttaattcttttgtctgtatattaagttaaaggaaaaatagacaaaaataagatgttaaatggatctatctggttacaatttcgatactttttgaagctgatctgatagttgtcttgcaatgataataaaacagcaccagggtagtggacaaattttaaaaagaaaaaaaactgtaaaaaacggagatatgaaaacaacacatgatccagaatatggatttacttattgttttattgaaactctttaacactgatttaaaagtgactgttaagtttgtaaataaaaattttatcgtatattaacaataattctacatttacttcgctggtttgtaaagtgtgttatattataatagctgcaaatttattatttaaacaagaaatgtttgttgacaacaataaatttattgttgaattaagaaaaactttttacaataaaaaaagaactatctaaagaaagaacaaagataaaaagattatccatctatgcttattacaataatacaaatggtatgtgtatagaggatcaaaaaggtctaacataacaaatagatcgtatgatattttttagaaatagaattgttgggaatgagcgcctttattcattggatatatagtaaacattttcaatattatattaaacagatttagtatacaaaattataataaagttcttcactttctttctctatatacaacatggaagtaataatacacaaagattgtaaataagataaaaataatgtatgatgaaatccttggctttatatatgttaacattcagccattttcctctacgaacagtaagatatttaataaataaactcaacaacttttggtgacctctcaacaattattactcaacaatttatcgtttagtgtctgctaaaatcttattgttctatctattttatcataaaacattctatttcaacaagaatattctggagtaaatagatagaccgattatatttcagcaaatataaatatatatcaaaatgcagagtgtgtattgtttatttattggtagatataaacaaaacaaattagcatttttttctagccctagaagggatatcatggataaaaaaatatgtgaagccaacaatttttttatactttgtttcttttcttgtatacgttttacatactatcatcgctgtattttacatatattcgaagaatctaagcttaatattgtgttgaaatagaatgttctataatgaaatagatagaacaataagattttagcagacactaaatgataaattgttgggtaataatcgttgagaggtaaccaaaggttgttgagtttgtttaataaatatcttactgttcgtagaggaaaatggctgaatgttaacatatataaagccaaggatttcatcatacattatttttatcttatttacaatctttgtgtattattacttccatgttgtatatagagaaagaaagtgaagaactttattataattttgtatactaaatctgtttaatataatattgaaaatgtttactatatatccaaataaaggtgctcattctcaacaattgcaatatatatagacactcactctgtcttaaatatttaatacaaaaaaaggtgcaatcgcgtagttgtttccataccaatcctatctttttttaactacataataatttcactctccattttccaaatttataaatattctatttcaacatttttataaccaccaccagattctactactctctagctctcgatacatatatacattaccaaatgtattctctatattacccttccttacgtctctgttctcttcctcgtgacaccatcaattctctgtcccatgttgttttttccgcggaacctttatttttcgctctttatattttttccacggaacaactcattttgtttttgtttttccaactcccctttttgaatttcacagaaaatcacaaattcctcgaggccgtggaaatgtttttgtgaaaatttagcagaacaaatttgcatttccaaatggctttctctttttttcaaacatgaaggaatgaaaatatgaaaacaaaaaaaaaataacatggaagtatctttcatcaattaaaagagagatctgatgtattgaactattttgtattcaccttagcatcatgataaaatataagctagatatgaatatacattctcagctgataatacaactactttaatacagtttcacaaaccttttctgtattctctgaactgtctttattcctattcaataactgtattaaatattacattgatatatcatattccagtatagcataccacaattactctagattgcaatttactatgatgtttaatacttatatccatgtttactatgataatatcactaacgatctctaatacaattttttttgaaacaatgtatttcataacatacaatattattcacaacattaacatctacttgaactgaactggtcttaacaaccaactaactttaattatatttttattcacttaataactctataacatcactgttagactatgcatttaccatcgatataaaacacattcacattaaatgaaaataacataacaaattgtactgatgaattgtttactcttaacttaatctaaacaggtcttcttatactgatatctcatattccttttttataactatcatcgatatatattacatcacattttactcgattactctcaatatcacataccatcacctcttgactatcaatcccatccaagatcaccttacttttttttaaaatctgaaaaatattttgcaagaatcaacaacaataacaaccactccaacagatatgtaaacaggatagacacactggtttgtaagcgatcaactatgatccactcactttcatatgatataactttgaacattagcaaaccattatttgatataatgtgattatgccatcttacatttacctatactcaatacaaccaactgggatattttaagctatagacaacccacttaatacatataccatcattagggaagatatccatcaatgatattacttctttataaatatgattatctaagaatatccaaacacttcccattaatatcttcagtctaaaagaaatgattgcatattattttattgtatattgaataactatcatatgaatagaatatcaactgactacgaaatgataacaggaataaataatgaatcttcaaacttacatggatatattaattgtattttatggcttagaaatgaacattatttattctattcatatcccagtcatctgataattttattactctttgttagacatagcagcataaatcttgaaataaattgcaaccttaaacattctggataataaataatataaacaaactctgaatatgtataataacttattaattattatactaggactgtgttgttatctactctaaaatgtgtgctatcttggatcttaactgtaatattaccaatatgaatataagtattagaacaagaacataactaacatgctttaaactacttaatctgttataaatgatctaacaattcttccaatgatgtatttataaatataatctgtattataaacatcatacttgtagattattaattgtgttaatttaacagaattatttgtgatactacaattcattatattaaaatgatctctttgattatcccaatactaatataacactatgacaatgagatagaaaaagatgataatctatatgagcaataattaaacccgctactattacttactgaatatattttgggtgttattaatattattaattattcatattccaaccaagaaagctatcattatttagaatgcttttatactcttaataggaatttatatattaatatgtttgtttaatcattaagtaacgtatcaataatgatcattacaactatactaaataacatcttactatctaacaagttaaacatttctggcttatgtaatacaccaactcaaacaggtctctatatactatacccctaactctttctcactccttatctttttcaatctcaataaattttaattgatcaaagaacatttcaacttttaatcatttcaatacatgcaaatgtacaaataaaataacttgattgttaataaatcatgtggtaaattttattccaacaagaatggcatctactggtattggtataaacttttataaaaatttaatatgtctccaaatttatttttctttatctaatggcatcatcattgtaaatttcaatattctaacagcagatgattttgcactaccactaattgactaaatagcaattacaactaaaaacatttgaattgggaaagtattgatgttgtacaattcattagagaactaagccaaaaatgactggaggataattcacgtaactgtattggatatcattcagtatatgttcaaaagttagagagtgaaatcatataaaagcacaataaaaaactttacacctaacccacgtataactcatagcattaatacactatatgacattaattgttatccacaaaagatagacatttgctgaaagctgctgtttcatagaaaaaaacttcctgtttcattgtattaaatatctcataacatcttgtaaattgattactcaagctaaactaacgttctttgtttgaataagttagataacactgtataaagtaggaaaaatcaacttatcatttgatagtaatactcaaaacgaacactattccacttttctcaattgtatataaatatggtaactcagataaaataattcctacagatcagcacaaaacctactttctgttgtgtatcccacacttaaaccatttttgtttttaattacaatatatttacaagttcatccatgtgtattatttgatttaatactgttgattgttggatattatgttggtgttgtaagaactgacaacagtgttatggaattttaccacttgacagtcagtaataatgaataaattttcatgaagaaatttaatcttggttattggtagggtgtatttttgtgagtgattttaatgcaatatttgtgatgtagttgggtagtagtacgatggtagttggcatagtgttgataattatactgtgaggttcatatatacggatagatttcatgatagtagtattgaagtgatcactatgtgaaattgatatgttatcagattatatcatttaggtggaagatactgtaagtgtttgtgtttatgtatttgtaaatactcatagcaatagagcaaccataccataaagatagatgtattttgtttataaatatcttccttagtaataacccatgtacaaagtggattgtcgtgaatatactctctatagttaaggatatcttggttggctgtatcaaatatatttatggcataattatatcatgttgaatggtagtatctcaatgttatataatgtgaatttgtgaaatgcatagatctcaactgaggatgtgttcttgtctgtaagcaggtttcctttgtattgtttacatcagtgtttgtgtggtgcagtgattgatatctgtttgagttgtttttatttgattgaaaaaagtttttggaatttaagaaaaattggatttcagaaaagaaaaagaatgaaaagataagaagacaattttagcatatgttggcagttacagttctacaaacagtgctgttttaaccaactagtaggtatagatcaaaaaagtcatgtaagaatgaataagtggctattctatattgtttgctatggtatggcataatacacaataaaagatagtattgtgcaaagtgatagttgtagtgggtagtgtaatttaataagagctattactaggatatcagtagaagtagatgtattaatggacatagcactttaaaatattaaatgtatgatagagagaagagaatataatgtgtagaaataaatctgactagtgagatattgtcgtggtgttatagggtattgctgtgtttgtggcttattgaaatataactggagatatctttgacaatctaaatttatcatattaaatgagtgacacaatatcgtgtattttatttatgtagaataaaacactgagcaacataagataaatttacagcaccaccaaccctactataagtaaactgagaactcatcatactaccaatattctattataagtttatatcagttcaacatgttaatattataataatttttaaaaaggttttgatacagagaccatgaattaacatatgactgctagtgtcaataacatcttagataaattttcttattctcttgaaataaaatattccagaatgaaatacatagaaaaaatgagattataacagataacaaacaacgaaactatttatacatattttactgttcgtggaggaaaatcacttgatatccatataaataaaactaaagattttctcgtatcataccttaattttatttgcactttttgtatattattaaaagcatgttctgcataaaaagtaaagaacattgctataattctgtgtacaaataattacataatagtcatagaatacaattgagaatatatctggtttattcaatacataaaggtgctaattctcaacaataacttctattatgtctcatagataatgcatatagtaagagtccaggtagctattaactattaataattgttggtaattaaatatgagatctaaaaaaagtgttaagttagatcatggatcccattatgtaatatgtattacttagtcaatattggttatattggtaaagttacatttttattattaggtctggagatatggagtgagtctacatcttttatctatccaagttatctattaatattaattccaagtcgactattatcaaaagctaataatcataaggttatcacaattggtagcgtttggtatcatatcactgaacacttgaaacttctaaagtggtgtaatctatcatatacaaatatagttaattcaaactcatatagatagtagtttacgatacaacaactgcagcctgatagaaaagtaataatagtgaataggaatcaaaaaggaagagtggcaattaatgacctgtatcacattggatccaatgaacccaattatcggtgtgtgcaagacacatacaccatgatatttcccaatcttcatctttactgttttgttccactgtatacatttcgtaaaagttcagtttctatctactattaacgccatttcccaacagctcttccaacatactttgaagtgaaaccacaacaaggtttatatttccaagtagtttatcacagatatgtgaatacgaatgacgtaatagaagatcattgttcttctattaaaaatgctgcctgagttatgttaactactttgtaaaacactatagtttttcttattcaatataatcccattgcatccctacaatattcagtaataattattatactaattctcacatactattatcatctatttctataatatttgtttttattagcttttattttatcttcatataatattgaaagtttttaatacttattttaaaccgattcttgcatagtatgaatatcaatataatattaaatattccaatcttaaatttatctattaaaaaacaaatgctatactatcacgtgttgattcttccatactaatatcatataggtgtttattaactacatctctatatgctttcattgtacatataataaattattatacttctacagagtatatccctataatagcaatttattttatgtctgatcaagtatcatattttgatattaagcaatgctgtgttatgcaatataaataatactaaactatttttatacatatataaaatacttataccataaaacttaataaatatacaaattactagaaatatagcatatatttattatttcttcaggctcaattttgtatcttcttgttcactaactgataataccatcacaaattacatcattaagtactctccatctgttagtcgtaacgaaatgatatggaaaattgtatatgttgtgacagttctagtcttaagcttattaacagtagttgagtttcaacgtgatctaacaatcatatttactcatacctaacattagcgatctttctttggacaagcatttcaacttacttatttaattaaccctgtgaatacctgttttaaaatgcttagtttctattactgattgtatataataatttatatctttacaagtattaaacatatcaagaatatttacatatttattaaaattattataaacacatattgtatttaataataatttaaggataatatatactttatgctaatgaatcatagaaatccatataaagggcctattaaaataataacaaagtcaattatattatacattttcttaatcattaagtaaaacggacaagtcactttatatgaggtataaatagtgagatgatggtgtgtaaaagatagttcatttttctctattatttagtttcttcatgaaattctagcattagaagtattctctatatggaatagtaataactaaatcaaaccctaactagctaaaatacaactgtgttaggattgaataatattctctgcacgtcttctctttaattattatatatatattatcgaatcaacttgcttcagacttaaaagttgttagcttacctggtagtttatcccctaattcctatttataatattcaactctatgtatatatatatcttttatatattgtaataaatattcaatgggggatattaatcaatatacttattatatgttcatttgtattaatatataccataataatatataaaataacagcttagatagacctatatttccatatggtatagtatatttagtaagtactgttatttaattaagatatattataaagacagttaataaattatgatataaggagctgtatatatcaattgacagtattgatatgttcataaaatagtatgaggatccatgtgtgtgaagaataatatatcgtatgaagcagactactaatactagattatatacataagatactactgacaacacagtgatgttatttaaatatatatacaccttggtatataattacttttaaatgtccatttccacttcacatttactggaaatactatctcaacggtacactctaaaaaattctttttattactgatctcacatataactacatatatttatctctctcattactattatccattaaatattaatttttaagaatatacagtacagtttcaatatcacatattgatatatcatcatttctcgttatatacaagtatcatttagtgttcatgcctttcacaatatcaagaatgtaatctccttacactctacctcatattacagagctgttgtgtcaaactaaatcaccacatctgcaatatatcaaccacatttgtttcattctattaacaagcacttattaagcaactaccactcctgcagttatttttactttctcatagttttatagtccacttcttttttcattttttaataataatattttacaagttctgaaatatcatctcaagaaacacaagagtaatatgattctagcaacaagaacacacaacaatataaacttacttagattaccgtattttttgccagtatattatttccatatttaattgacaatgaaaattcttcaatacctttataattctttatttgtttatatgatttaatctttatcacaatctagcaatatacaattattcttatccatacagttgttgaattatgatcttgttttgttttttgatatactatttgcatagtaatatctttttatatcatatggaaataattagtatgtgcattcgcaatcaataatcactttcatttactaattcctgcatatcaacaaaatacaatatactcaactatgttacatctaatcctattctatatgtatttcctctttaaattagttcaataaaattcaaaaagcatgatcacgagaatctaatattgttcaaaaatttcatggttgaatcttgtttttatttataaatagacagtgatctccattagcacactgttattaattcttttaccaatcaatttcttattctaacagtatcactttatttatcctattttatcatttcttataacatcttaataccccttttatattggtcatttgtttgttatttaattcttagaagttctcttttcttaccattgtatttcaacatatatattcttactctctttcaagagttatcatgacaatgaaatatcaactttaccaaactactattttttcacatccatctgtttgcttcgtgaaattcagatatattacattatctcttcttcgaataattgtttcatataacttattctgtgtttattattcataataatattataacctttggataaacgtatcttctcaccactgatacatcattacatttccatacttttttactaatctttgtaaagtatcacgccttcattataccttatattctatgttacttctattgttatatattagaatgaaatttccacaataaaaaagtagttattatagaataccactattatatttgtcagctgtcttatatcttaatgtttttcaatacagtataagtataatacttaagaatgcacgaaaccaactctgctcgataaaaataacacacaatatttcaaatagttcatgtggtatgtacttgtgaatattctaactagttctattacaatatggtcatctagtacaactttgctttttgattggttgaaccagtaagaaccctatatagtgttcatcaaatggaatatgcaattaggaacatcacattagttacttcttgtatatttgttatgcaatatcacaaaaatacagtctctagaaatagtatttatatgacttaacctaactacaataaaatatatttattaaatatcgttgcttgtatttgttcaaattgtatgcacattagtcattactccgggttgttcttcaatccttggatgattgatattctaatatacttttaaattggcagtgtcattcttagaatgttgtgtttagtgttcttatatactcgttctttctagtgtacagtaaataaacagaaaatattttcaaaaggctagtgggaaagtatagagtgaaccacactggagaaatctagcagatataacatgaaatatattctaatcgtagcattcattgtttaaactagttacttaacactcacaaagaaatatactagtcaaaacacagttacgtgctttgtattttttcaaatttttaaatattttttctcgatgtcatcacagaatttttttgctgcagcagtttttccatcaacgatgagatgaaaagtagattaagagaagaaaagaagaaaagagtacttgtagtaattatctttaaatagtgatgttggaactttcattagatagaaaacaagatttcaatatgcagtggtatattttatttctaacatgaattggtatatattcatagtgtgataatatatgttgtgtttttaaaatatcaatataccttcttagatattatcatagttcaactattaaataaagtacattagcatttcaagttctctggatagaagtctgtttaaagtgttctttgctatgctagtttattaaactttcattatgttagtatatatggattatttattaatgttcagttaaattattgtggttttataactccattatttgttgttgaatgttaacaatttctgtgttatactgttacttttattatgtcgtcgaaatagaatatttgagaatgaaacaaatggaacaatgagattccaacatatgacaccactggaatgctgaggaactgttgcttacatgtcacaaaatgttaataatactgcttgcttgatttttgccattcatagaagagaagtaacaaaatttaacatacacaaagacaacattttttcaaatcgtgtttcttttcccgcatacttttcacatattatcatttctgtgttatacatacagaagaagatggaagaactttaatacaattttgtaatatatatttatccaattacagtattgagaacgttcactatttatccaatgactatgagcaccaattcttaacaactttaatatactataataaaatatatattgttaatgtgaggtgtgggagaggcaactatgaatttacagaatgattattcatatgctatgactattactattattcaaagaaatcacaatccacaaaactatttctgaaagtatttccttctctcttatttttgagtttggaaagatcattgcattctgacagttaattttctagaacagtagttgtcataactttttcaaatgaactataccatagtactcttgagaataaaaatatgaattgtatatgggtaattgtcaaagaattcattttctgtaattgatataatttctgtattagttatacaaacactcttacttatactcagatatagtttttaacttgttgttgctggccttattctatagtaagaattaccttcggatatcatccccaacatgaatgtataaagatatctgtgaatgtatttcattatcacgacaatacatcatcttataaatttcttatatccctatggatcttattaacaataaaattattacgttaacattaggataagttctattacatgaaagtatttacagacacgtaacactcgataatatattttgtaaaatcttgtattaaacatcaataaacaaaatagcaaccattagataattattttatcaatcttttttttctacaaggataagacaaaacagaaagaacctattcgtttttatgaatctatgattatattactgttgtatttatttgttttttgaattgttttgaagaacacttttaaagtggtatgatggggaatatttgatttttcttttatgtttttttgacaatactttcttaataatattcttgcatttggtttaatcatcatgaaagtttgggaaatgtcatatcaattcttcgtagatttatagttcttgaggtcttgaatatgttaatttatgctgttttggctgtattgttgttaaaacacaagttttttgagaatcaaaagtattagggtgttgtttatattctgtttatatctatttagctagtattaattcctcacgttttgtaaatagtattgaagcaagatatccgatttcatgaataccttaatatacaatcttgtgatgagaagatcgacccaaaacattacaaaaacttataaatatctacagttgtaattatatataaataaagagttgttacaagttctccagagaagtgatctttatttatatttcaaaccacagtgctaagagacctgttttaataaataaacaacaataataatatttgttgattgtctaacttacaaatatggaaaaattatgctaggctctaaaggttcattatgagtacttatttattaagttgtaactatttaatcctcgcgtgtgatgttctgaaacatgatgagataagagaaatgatgttgtcaataatacaaattagaatgtgtgagtttttgtagtcgattatcaaataatccacgtaggaaattttatatcaaagctcacttaaagaggtctttgatccagtttgatagattgtagggataattatcaacattggattatgatatagttgagtccaatataatataattagacaatatatcgtatgttcacaagatcttttttgttaaaaactgattttggtagatcgttggtaatttttttgaaagaagtaaagttgtgaaagatcaatatgtatttaataataaatacaatatatactatttgcatgggttttcaataaacgagaaatccaatttactaaatacttaaaacataacaacgttagactttaagtctactatattctaagaaatgccatattagcatccctgaaactctaatttcaaatgttaaatctacaaaattatacttccataaacaattaagattatttaaattaaatatcattttaaatattttcatagaataaatgcttgatcataaacagtagaaagatggtatagtgtttaacataaatctatttatcaaagtcttctttgaaatgaaaaacgtaagcagatttttcaaatttgtggctttcactgcatatagaacatgtagattgtttttggatcgatcttgttttctggaagataattctgtattattaggcacagaatatttatcataattctctaaaaactgtctaagatatcttttctcatgagtagagtaaagactattttccatgtcaaatgattatatgaacaatttatacttaatccaccaactataccaaggtaagcaaaacaatgagctctttctaaaaagtttctgaaacatatatatcactatctctttctttaaatcacaaaatatgagtgaaccacaattttcgaaacaataaaaataacaacgatagagtcatttgttttctgataaatagatcaataaatttagaccattctcttttcatgtgtaagatatagaaacaatgtaaacaacgtaaacttaatacactggattaatatgatccatcaatggttattttatcacatcttatatttgcagctacatttctaggtttattatggtaatattatctagtaaattttatcgctcttttaaacctataacatacaatgttattcacagtgtctgtcatcatgatattaatgtgtatctttactatggatttatacatagtagactaagttcatatcaaccactatttctttcaattatgtctttactcttgaactgcttacttcatttggacattaataactggtagattgtatggtatcactcttaaactatgaactctttgttaatatacaacttcttttgatattatgtcttagacaagaacgatactacacaaacacatcacacttaattattcttagcatcagctatcatgatctcttcacaatccaccaatctcatttcattcaaatttcaattgtcaattttccttgtgtcaaaatttgaaaaaatagttcgaaaaaaaaaattaattacaataataaccactctcatcgacaaccaagtatataagtaaccaacttcacttataaatagccagttattatctgccttctttacatattcatatgatataatattgaatattatcaaacagttatttgacatgacatagttacaccactgtatgtctaataatcatttatatttgactatcagaaataacctcataacgacttactccatgcatagactgtgactatggaagatatttattgacaaactatgaccattttttgtgtcactaccacttttattatgaatataactattaaagtatactccaataacacatgaacaccatcccttactaatattttcaatatgaaaaatataattataccttctatatcacttcattatccatcgaatgatactgttataataatttatgatcatatgcaatactcttttgaaattaacacataatgataactgttataaacataaatacaattatgctatatccataaacaaatttactatatcatctttttactcatatcttccaggatatttatccttactaattccaatctattatacatggatttgatttatgtttgatgttcaatgtttatggtaatgatgataaaagacaaattgatttgatataatgaacaatattttgattatatctttattccattctactctactactttccctgttcaataatttttgttgtgtcttttactcagatgatcttattttaatgtttgaaaagataatatagtagagagaaattttatctcgatctttgaacattgaacaacatttaaaaatatactatggtggagtattaacatgaaaatttatcaatttactattcaggaaatctactttctttaagaattagtctgacattattatgactagatgtttaatattgtgtatgaatctctaactgcaacaaagaattatgagaagttattgatattcaaaaaaaaataaaaataataagactttgattccattataacattaaaataacaagacataatatatctatgaattaacatttgcaaaaatacgactgtgttatgatagttttacatgttccttatttaaaaagaaaattttcacattatcggaatccttggataattattattattattattattattattattattattattattattattattattattattattattattattattattattattattattattattattattattattattattattattattacaatatttttcacatatagaggggacattttcctgtatcttgtaaatcttgaaagttctacacccagtaaaagacaagaagagatatcatatgttttcaaaataaggtacattacgaaattctgtgtatctacatttttgagtattatattcttaatatgtagaataagtataatatatcatcagtgtgcaattctctgcatttgggaaatagcatgttatttctctttctttcccctttttcctttgctacctaaaaggagtttccatttcttcaaatatttttagagtaattctatagtatgtctctactgttcatgtgaatataatagttattggatatgttagcttacgtacaattgaatattatattacaaaaaagaagaaatagaagtataaccataagtttaagcgagttaataacagtgaccatattaacacaaatatacctatatacagttatttgacttagcaatatataacgatgtttaattagtgtacatccatgtatatattcatgtattatgcacttcctatgtatgtatttgtatatacaaaggacagaaagaaaataattaaggaacatgggaataaacacatttgtctagttaacttttggatacaaatgcaggaaaagaaagattgtaactattcttaagattattataagccctttattatgatctttgaattaaactagcattaaagttttataattacaatttttcttaattagaaagggtttaagaatcttataacctttaaactatgatcaattgattcatatagaagtaaatttcctaatcacaatctctttattaaaaattgccaaaacatgtagcaaaaatatacatgtattaaaatgtttatgtagcagctattagatggtacaattgtgttgaatattctaaattatttgaaatcaagggacagcattgttggtttatcaggtacgatcacatctatctttggtgtacaagatacttggaaatcaaataaataataaaaaaacacagtatgaaaaatattagaatgttatatatgcttatatagaaacatttaattatttaattatctaatattcttgatcttaaaattattcatatgtgtgtaacttaaaaattcataaataataatagaccaataaaatgtacgacactccacttcatatatatgttactacctttaccttcatatgatacaagagaaggtgtatcaccatgaggtaccgcaatagcaattggtgatggggatagttgttcagaaatatattgggagacttgtggtaccattgtggttggtgatgtttttggtcccctagactcattattaccgattacagtggtagatgttctagagtttctagatgttgggtgatttttaccattggtaaatgctggaccaggggtggtagaagtaacagaaataactggagtcacatttgtagcagtagtaaatgagttagtctcttcttgtgggttctttgaataaactgattcaatagaactatgtccaatgatagcaatcatacttgtttcagaagttgcagatggttctggacaataagttgtagtcatagtaactccattaacaaccgtagtcaaaacaactagagtgccactcaaagtagtttcagtttttccattatgaatagtggaattttcatatagtggagaagatatagaaattgatgaggtcataaagtcattatatggaggaggtgtaatcacaacaaccacaactgcagcagatgaagagccgttgttgtcagtaactgtggttgtgtaggtgtttgtggttggagcagaaactggacctgtggtagtagtataggtggtagatggagcaggtgtgaccacaacaacaacaactttggtggaggatgagccgttgccatcagtaacaatggtggtgtaggtggatgttgttggagcagaaacatctgcagtagtagttgtgtaggcagttggaccagttggagatggggtgaccactacaacaacaacttctggagacaaagagccattgctatcaacaactgtagtagtgtaagtagttgtggttggggcggaaactggacctgtggtagtgatgtaggaagtagatggagatggggtgaccacaacaacaacaacttcagcagatgaagagccattgcctcctgtgatggtagtagtgtaagtagttgtgattggagcagaaacatctgcagtagtagtagtgtaggaagtagatggagatggggtgaccacaacaacaacaacttcagcagatgaagagccgttactgtcagtgacggtggttgtgtaagtagttgtggttggaacagaaacatctgcagtagtagtagtgtaggaagtagatgcagatggggtggccactaccacaacaacttctgtggaagaggaaccgttactgccagtgacgatagtggtgtaagtggttgtaattggagcagaaatatctgcagtagtagtagtgtaggtggtagatggagatggggtgaccacaacaacaacaacttcagcagatgaagagccattgctgtcagttacgctagttgtgtaggtagagataacagatggtgaatctactgtacctggaatgtaggaagtaacctgacttggcattggggtctcaacaatcacaacatcaattggagtgttgctgccattggagtcagtggtgtaggagatggaggtggagatagtagatgttgaatttactgtaccgggaatgtaggaagtaacctgacttggcattggggtctcaacaatcacaacatcaattggagtgctactgcctttggagtcagtggtgtaggaggtggaggtggagatagtagatgttgaatttactgtaccgggaatgtaggaagtaacctgacttggcattggggtctcaacaatcacaacatcaattggagtgctactgcctttggagtcagtggtgtaggaggtggatgtggtgataacagatattgagttaactgtacctggaacgtaggatgtggttaacataggggcaggaattccctcatagtaaacaactacaacttcttcattataagaattaagcatagttgtaatcgtggttgtttgagtagttgtggttgcacttaaaccatgaactgtgcttgtgattatagaggttactgttgtgcatgctttggatgcactgtatgtgaaagatatatctgaagtattagtgaaactttcatctgggaaactgtataaactattacctataccattatctacagtaccatttggcaaatttattgatatatttaacagaccatggttaatcagattaacatatagaaacttaagaggataataattaccttctttcatatatattgtctttacttctgtatccataccatatataacactaccagtgaccgtaaaaacatattctggggatgaaaaatcttcatgttgacctccgcagttaaaagcttcgccagcacccaagaaaaacgtgagggaatcatctacattagcccttagggtataaatacctgttagtggagctttataataaccggtaatttccatcatgaaatgactgatggaaacacctctataatcatacggaggaatggtccaatgatctccagaataccatgttaaatttgtaacaccagaaattgtacccacatatgtattccttaaataaccacctagtaaaaatgatgattcttcataactcctagaatcaccagcagtgtattgaaaaaacctgacggtggccccaatagtaccgtcatgtggaactgtacatgcagctggggcgtaggctgctgtagcaaattgtaagtgtatatgtaaccataacagtgtggtaacaaggttcttataacacaataacatattgtattattaagattgaaaacgacagaaatattgtaaactttaaatgaggggatactttgatattagaaataacctatggatgtattatgatttatatagcgagtcgttcttgttttacttgatgtgtgcgtttcaaacttataagaaaagttagttttggcaaacctcagtaaaggaagataggatcatatctaaaaattagatgtgtgaatatgatacccttttatatttgaagaatcgcatagaaaattgcagttcataatataataaagctttttgaaatttttttctgcttgaaggtattttgtttagtaatagaaatgttaaatattttaacaattggattaattaaacgttttaatgcaagaaacaattgcaaatgtaatagatttgtatatattgtaatgtatcatgcaggactgattatgtcatacattatgaaatttgtaagatgtgttgatggaatgtatgtttttcccgattttgaagaaataaaagttttttcccgaaaagatcactggcaaaattatttggtatttttgaaaggttaaaattttttttttttttattttttctccattataagattgatgttattttttttattttttttttcaaattccgaagaacaaaaggaagttatccagtgtcagggattgttcggttttctgtttttctttttctaaaaagggcaatacaagaaaacaattaggaatacaatagaaacgtttgtattattatgtatcatacagaatttattgtgtcatacattatgaaattcatgaaatcgattgataaaatgtattttttttgtattgaataactaggaatttctttttgtccaaaaaaatattacttgaaaaattttgatacttttgaaaggtcaaagttttttcctacttttttccccattagaaggtccatattgtactatattttttctatttttgctatcaaggtcagaagagtagtttacactagaatattttagtattccaacctcacagaaaagattattgaaaaaatgaagactatctgaaaaaattttaacgataagaattttacagaataaaacagaacacatgtataacacagatacaacatagatagggtataaagtggttttctgtattttcctaattggtcatagttattggaaattcgggtttgcagaagatatgttagaaactactcagattaccttgattttggaaaaaacttagattaaataaattatctccagataaatttctatgtacgtacgcaagtatagtttgtaattactttacagttgtcttctctttgtatattcgatattatttaaactagtattttcagggtttattttaaaaaaagttagtcataggttaatttgcagaaaaggttgcggtaaattttcaaaaacttctctataaggatatatttttataacgacctataaaatcgtgtcggaatctttgctttaagagttttacatccttttaggttgcaaaaaagatttacgatgaattctaaacacataattttctgtgcactttttcaaattattttcttttttcttttgcaagattctactaaatctttttttgaatattaatatcacttttttaagctattttgattttcaaaaaaaaattattaaggatatttctaaattgcacccttatcgttaaatatagaagagattgagatattttaaatgtagtaaatacattgatagtattatctttttaactaagaacagtaatgttggtttaattacatattttttaaaactactttgtagcaaatatgaagaaaaattgtgtaaaaagttttaaaaaggaaaatctcctctggatgaataatattagtgtacatgtttttagcatcagtgatcatattatatgttattattgtgtattattattatgttgatatgtagagtaattttccctcgatttctcaattgggaattaataattatataaatacaaaagaaacaaatgatagaatatatataaattattcatccagattggaaattaataagtaaagtcgtttacttatatatgtttaccttttggtaatttttcataatgcattgatttattttaattttatttgatcttaccctcgtaatattgaatatgtataacaaacattttccttctttgatacatccacttgttttttaaacaggtaatatattatcctagctcaaagaaaaaagcacataaaatagtgctactttctaagaacatttgaactttcattttagcacacagttaatgacttaataaaaagttttaaagaggtaggaaatctttatttttgtatttttaatttttttcctattatttttttgcataatctgtattatttccaaaataacatgatcactctcctcaattttcttgttttaggtagagtttagaattttctctgaattatattaggtagacgcaagttccatcgggcatatccgataataaacgcattattattttaaactagaaattttgatctttctttgaaagtaatttatagaattttcaaatgtggaagtgttattttggcgagagtataatggaattgagatattttttactaaaaacttacatctataactaattagtattgtacatgttggtataggaatatctatctaatcagaactaaaaggaaaaaaaaataaaaataaaacgaattttatacgataaaaaaatgctactatgggagtattgttttatgcaggaaataaaaataagtgtagcaaaaaagcaccggaaattggaaaatcatcaaatcatcacgaaatttacaaaaaaggaaatgttcaaatgggcaaaaaaaaataaataggctttattttgctatactacaaccaatacataaacgcgtatacaatagtttgcataacaatggttatgtcccaaaagaattcacaattgcatgtttgtttgttttttttagtattttcctttcttattgtcaatatcggtaccagttagagtagattaatcaggaattcagtatatcgactgtttctattaaatgaaactattgttccattcttacatagtgtacccattattaatattttatatagtattgcggcatttttagtaacttcactggatttggaaactactatttgttggttttaatagattactaagcttatcaccaaaattcctagtttctttagaaatggtttgttttcaattgacttaatatttgtgaatcaataatagagtaatagccataatatcataaaccatatttttttgctgttccttcctgtgattttctttctctatccttcagtgtctggcatttcctttaagattttgaacgtaactggcttttttgttactatatagtaattcagtgaaaagtatccactttgtagtaaaatgtttctgtcaaaatttggagccctcggcgttcatggtaataacaggcatcgttaagttatagatgcttgttgtgttttgtactaaatgcatgtatatacttattatatagtggatacagtatgcattcttatatttactttaagtctttttttagagtttgcatttcttttcaaatctgtgaaaaacatatttggtgacaattaaaatgttttcctgatattatgtacatccgtgcaccacataatatacagaaaaactaattaaaaataattcttatggaaataacagtaataagctctcattttccaacagttttatatttaaaaggtctcgtttattgtcttaaaaactaagagatatgatgcatattaacttgctttttttgacacacagtgcggtaagtattagttatttttttatagaaatgtgtttactacagaagtaggtattgaatagaaaaagatgttaagaaaagttttgaaagttagttgttttttctgaataaattttagttgtttatagatcgattttggaaatatgattattttataataaaagcttagttgtctctgagttttagatatattacaaaaagaatgaaaatgaaattctttgtttttgggttttaacaaaaaacaaaggcactgaaactatattaacgaagatattaatttttgacactttttaatgttttctttttgcgcaaaatacagttctgatgttgaaaagtaacaactgtttgcatttggtaaatcgggtgcattctcaatcataaatattatacaaaattacaatagagttttccattttcttttgtaggcacaatacaaaagtaattatatacaaaaaggataagcaaaataaggatgatataggaatattcttaaatttggcatctgtggttattaagtaatgttttttgacaaacaactaaaaagattagtcaaatatttccaacaaagcttagtcatgtctaaatcataaacactcatttttccattgattagtatctgttaggatctgatcggtctattattttattctataacattcttttttagcaagcctcattaaggaatcatattattggaattttacatgacctatgataatttttcattttattttttttggctttaatataaatatatatttgcattaaaaagacacaaatttaaaaccctatttttaatgttaaaagttctacgtggaaaacctgaagcatataatctatgggtaatgatatatagccacaataaaagatttagaacagccacaactctcaataaaaactataaatgtatattagaagttattgaattagtgttggtacaaagttatggagaaacttattcaagaaatcaccagttattgtacaaaagcaacaaaggtaatttttggtaaaattattttcattgtaatatttcttagatgttactaaagagatatattagtattaatacaaggaatatacattacattattaatttatcagttaaaattaatgacttaatagttttgtgactgtgttactatacatagtttaatgtattatatgagctaatgttgacaaatatttagagatatatttattaatgtaaatccattataataaataactgaaaaatataaaatttttatattaaagaagttcaggtacgaaatgggttgtattgtatataattctgctatatgcttgtggttttaactggcgaacgcattagatattttagtttatatgttgcttacttttcttttctgtttgtacataatatgtaaatctatatatatgtattctataaaagtactaaagtatcttcttatatcttgttcttctttattttttgaaaatttttctttccttttatagatctagatatcacataaaacattgtttgcataataaaaacttgtttaatattcactgttcatggtactaattgcagcaatttatatacagttgggaaaggtagaatagtgtttgttttgagtattgcgatcaaatgataagttgatttttcctactttatacaatgttatctgatttattcaaacaaacaaccttagcttagcttgaataatcaatttacaagatgctatgagatatttaatacaataaagcaggatgtttttttctatgaaacagcagctttcagcaaatgtctatcttttgtggataaagatcaatgtcatatagcgtattaatgctataagctattttttatcgctatgagttatatgtgggttaggtgtaaagttttttattgtgcttttatatgatttcactctctaacttttgaacatatactgaatgatatccaatacagttacgtgaattatcctccagtcatttttggcttagttctctaatgaattgtacaacatcaatactttcccaattcaaatgtttttagttgtaattgctatttagtcaattagtggtagtgcaaaatcatctgctgttagaatattgcaatttacgatgatgatatcattagataaagaaaaataaatttggaaacatattaaatttttattaaggtttataccaataccagtaggtgccattcttgttggaataaaatttaccacatgatttatgaataatcaagttattttatttgtacatttgcatgtattgaaatgattaaaaagtgaaatgttctttgattaattaaaattttgttgagattgaaaaagataaagaatgagaaagagttaggggtatagtatatagagacctgtttgagttagtgtattacataagccagaaatgtttaacttgttagatagtaagatgttatttaagatagttgcaatgatcattattgatatgttacctgatgatcaaacaaacatattaatatataaatttctattaagagtataaaagcattctaaataatgatagctttcttggttggaatatgaataattaataatattaataacaccaaaaatatattcagtaagtaatagtagcgggtttaattattgttcatatagattgttatctttgtctatctcattgtcatagtgttatattagtattgggataatcaaagagatcattttaatataatgaattgtagtatcgcaaataattctgttaaattaatacaattaataatctactagtgtgatgtttataatgtagaatataattatagatacattattggaagagttgttagatcatttataacagattagatagtttgaaacatgttagttatgttcttgttctaatacttatattcatattggtaatattacagttaagatccaagatagcacacattttagagtagataacaacacagtcctagtataataattaataagttattatacatattcagagtttgtttatattatttattatccagaatgtttaaggttgtaatttatttcaagatttatgctgctatgtctaacaaagagtaataaaattatcagatgactgggatataaataaaataaataatgttcatttctaagccataaaatacaattaatatatccatgtaagtttgaagattcattatttattcctgttatcatttcctagtcagttgatattttgttcatatgataatcattaaacatacaataaaataatatgcaatcatttcttttagactgaagatattaatgggaagtgtttggatattcttagataatcatatttataaagaagttatatcattgatggatatcttccctaatgatagtatatgtattaagtaggttgtctatagcttaaaatatcccagttggttgtattgagtataggtaaatgtaagatggcataatcacattatatcaaataatggtttgctaatgttcaaagttatgtgacatgaaagtgagtggatcatagttgatcgcttacaaaccagtgtgtctatcctgtttacatatctgttggagtggttgttattgttgttgatgcttgcaaaatatttttcagattaaaaaaaatagagtaattttggatgggattgatagtcaggaggtgatggtatgtgatattgagagtaatcgagtaaaatgtgatgtaccaaatagcgatgatagttataaaaaaggaatatgagatatcagtataagaagacctgtttagattaagttaagagtaaacaattcatcagtacaatttgttatgttattttcatttaatgtgaatgtgttttatatcgatggtaaatgcatagtctaacagtgatgttatagagttattaagtgaataaaaatataattaaagttagttggttgttaagaccagttcagttcaagtagatgttaatgttgtgaataatattgtatgttatgaaatacattgtttcaaaaaaaattgtattagagatcgttagtgatattatcatggtaaacacgaatataagtattaaacatcatagtaaattgcaatctagagtaattgtggtatgctatactggaatatgatatattaatgtaatatttaatacagttattgaataggaataaagacagttcagagaatacagaaaaggtttgtgaaactgtattaaagtagttgtattatcagctgagaatgtatattcatatctagcttatattttatcatgatgctaaggtgaatacaaaatagttcaatacatcagatctctcttttaattgatgaaagatacttccatgttatttgttttttgttttcatattttcattccttcatgtttgaaaaaaagagaaagccatttggaaatgcaaatttgttctgctaaattttcacaaaaacatttccacggcctcgaggaatttgtgattttctgcgaaattcaaaaaggggagttggaaaaacaaaaacaaaatgagttgttccgtggaaaaataaaggttccgcggaaaaaacaacatgggacagagaattggtgattctacagagatactgatggtgtcacgaggaagagaacagagacgtaaggaagggtaatatagagaatacatttggtaatgtatatatgtatcgagagctagagagtagtagaatctggtggtggttataaaaatgttgaaatagaatatttataaatttggaaaatggagagtgaaattattatgtagttaaaaaaagataggattggtatggaaacaactacgcgattgcacctttttttgtattaaatatttaagacagagtaagtgtctatatatattgcaattgttgagaatgagcaacaaaacaatttttgaagaaaatgagttttcttgctttattactctttttattttaatacataaacatattttttctcaatttgttaaaggtagaagttactcgatatttgaacaatgaaaattagtgtgaagtaagtcatttagataaattcaataactgtggcagaatagtaaaaaaatgatattaaatcattatattatgtatatgaagtctttatataaatgcaatactgccttggtacaaattataattgtatatgcaatgggattaattcatattgatgaatgtgatgaaacctgatattgatcagtataaaaatttaaaaaagaatataacagtgcattactttatgattgttttttttgttgaattgttactttgattttgttgttgtttatttatttaagaattttagataagaaatatcagtaacttagaattccattcaatttaatattaaatagtttgcttctataacagtctattttttttttgttttatgcattctagtatttgaggatgagttattttcttatatctcaaacatttaaaccaaacttggattttcttctaatacgagagccatatttcaagaaaatgaatggaacaggaattaaggcagcagcgaataaacctaaaagcaaaccggcccaaccagtacccatgccacggaacatgtatccagcaaatagtgggaatgcagcaccaaacgacgatcttaagaaagtgttggcagctacagcagaggcagcgacaagtaagtatgattcaataatataatttaagcacggtaagaaaattcccatcaaaccaaacccaataaaagagccagcaatagttggacaaatccaatggattttgtctggatagttaccggtccagcagaaccatagaataccgattgggaaaacaatactagcaaaaaccattggatataatcttgcttcaggaactaaatgacctgcttttctaactctttttaaataatcaccttcccaataccagataaatgctgcgcagaaaatcataccaataattaatgcaatatatggtagttcaccattttccttataaccgtaaccagcaacaaatacgattggatatgcttccaacataagatataaaataccataaacaaaggagttatagattgaaatgataagtaaagatggttcagtggctaacatgattaatggcctggtgatagttttttgagcaatttctttaattgataattcgacattttcatgagcggcatgaatcccccaattatttgtatcttttcttaattttttagctttctgaactaagattgatgggtgatgagtctctgggaaaaatagaaatatgaaagcaaaaacagcactagagaaacaaccaactacatattctaaccatctccaggtagttctttgagcaatatatgaccccatgacgggagataaaattggaccgacaaacacaccaagggaaaataaacagatagctttacctctcatatcagtatcgaatatatctgcaaaggcagctggaacgacagccattggcgcagcaccaatcaaaccaccgaaaaatctgcagataaaaatagtttgtaaatccttagcagtggcaacagcaaattgaaaacaagcaaaaccaaatgcagatatcactagaacacctcttctcccatatatttcagatattggtgcatatataataggagatgcggcaaaacctaacacgaaaagggtgatacctaagatagctacaacttcaatgataccataaatttcacagatttgtggaacaccagaagcaaatatactacttgccatagtgatacaaatacagttcaagcataacataacacagatcatgactttctttttcattggccaattaaaaggatgtagaggatcatttggaccgtcaaaagtaacttcatataattcccttggtggcagtgcaggtggatagtctctatcacctcccatagggagagtattagaataatctactgcaattctttctggttcatttactgtaccagtaagaattttagataatcttcttgtattttccacattagactcagccaaggatgtcatggtggtagttctttgtatttttagatttaccttttggtcttcatcaagtatatccatatcaccatcatattctataggattggaaacagtagatgcagaagaagcctgacttggagaaagatcagtctccttttgagagtctgatgtctctgacatattgtattgaattgttatatttctttgtttttttagtatgtttacgcaaaaaaattgttataataaatatcccgatgtttttttaaataaatggactgaaacaaattcagataaggaacaaagtatattttaatgttcattagaataaaaaattaaatactggcagaacacaacgttcttatataaatgttaaacatcttctctagtgattggaaaagtggggacccttgaaaaaaaaattagggaaaaattttgaaaatttgaaaaagaacatatatataacaccgacataaaaaagatcgggttagataacatttttggttgttttcctaaacataatattggtggagacttagggttcattggaaaaaacttattttgaaacaatctgtttgtttccatttctcattattaatattcatacaaaacgagcaatcacaggacaactaaataataatttgctttatttttatatctgtttttcttttttagtacaattacatttatcattcaaaataatggtaaggttgtgtaatatagtaaggttgtaaaggtgccttcaacgggacaatcagtggtggatttgtataattattttacagtttagatttattttttaaatcaaataaatgtttttagggcccagttaaaaaaatctgtactaatgttaattttcaatagggttacaacatattttttaagaaatgtttttaggtgtatgcttttttaaaaagaaaaaaaattttttttcttttgtttcggtttgttctcgtattgtcttgctgtcttctctatcggtccattgaaagatacaaaattccgtttttaataagaaaatagaaaaaaaaagaaaagaaaagaaaaaagaaaaaaacacggctcgttgcttccgccctgcttccgtccttccgttattgtgttttcgttccatttttacataacaatataaaagaaatctcttcctttgatctgttctcttttttctttttttttaagaaaatttaatagaaaatttccatatcgggtagtagtattttttaggaagtattagtgtctatgtttagggttacaaaaaaatgtatattttttgttcatgtaggaaggatgtactacttagtagacaatggagtattacacaaggaacctatcttgaaattttatgtacagataaaaattaatagcaggacaaaaatagcccttctttatcataagcatgaaaaaagagagaagtaacttggaactttgacaaattaagaaaagttttgttttagagtaaaaattatcacatgcatacttattatattctggttggggtttttcacctgaagaattttactgtgattattattttatcatattttctattgtactcttcaaacacaaaaaaagaaaggaaaaggaaaaagaaatggaaaataacacgattgcactgataaaaatcagatatacaaaccgtaatattagcaggatagccttgttcttttatccgcataaggaaatttataaactttttaaaaattcttagtaatccgtggagtagtttttgtctattttttttttatttccgttccgcggaaatgaatcaaatctttttttctttgtttgtttatttgttaatgcactcggtcatgtatttagacatagtcatcatttttcttaatattactaagtttgatttttattagtgtgctttgtgaatttcgattagcaagactcataaacgatgtactagtaagtgtgaatcagtaaaagtatagtctagatcaattctccgaaaagaattgttagagtaattgatatattctttatactcaattatatcgtttaaacagagtggggttaccaatagaagagtcactatttttttggtttctgttaaccatttgttaatttatattattatataagttctatcattatttttattaggttattttattttatttgccaagaaatagtgtaggtaacgtttggtacgttgcaaaatgatgtttttcataaattaactaatttattatgcgttttattaaagaaatctttttttttaagtaactctattaatatgcatgtaagtgaattgatataaaataacatcattacttcaatttttttatttgtttttcactttttggtgttaagtatgtgaagcaagctatttggtaaaatgtttattattgaaactgtattagaaaatgttgaaatttaaaaggtgtggagtaataacctataagttataacggaactttatgaaccgtatttttataagtaatcactcacagtattgaataatacatatattatatacaaaactatgtattacgtatataaagttgtgagtaaaagaaattatttctaatttctatatcttgactatttatacttttcagaaagttaattttgagaaaaaaaattttcacaaaaatttttattgagtctgggtaatatctcaacagaaaagatatattttatgttcagaaagaacagtgtatttactttcgtattctggaattgattccaatcaataataatcaaaaatagtaacaaactacactgtcacaaattcattcacaattttgtttaataatactatttaaaacaaaaatgtggaatggaagtgtaagtaatatttttgtagggagtaattataatattatgttttaatatatcattcttttaacttattaattcaatatctttacttttttggtaacatttgtcaaatattacaaatatttttcttaatacctgaacaactttattattattgtacatgtttcgtttcttcctcaaaatctctgtaaagtgaaagaagtgaaattgagctgcacttcaatagtatgctagatatatcacaatgattttatgttggtggtctactattactctatttgatattaaaacttgttttttttctgtcttggttaataattttttgtattcaacctctttttatgatatttatagtttattaagtagtatattttattcttatgtttagataatacatgttttaaaaatatagacagataaataaatagatggaaaagcctgcataataaaagatatttgtacctaaacccgtttgattaaaattaaaaacatgataaatctggagtattttgaagtgaattaatacttaatttacaagacattattaatgaaatttacttcttctttttggttttgtaaattataggtatctttaatactaaattgagtaaggataaattgaatactatattgggtactatctttagatatagaggaaaggctcattagactatgatattatatgcattgtcatttattttttttctttagaatatgtgtaaataaaatctaaggttttaaagtatgttcaaaattttaatttatagaactattattaatagaaacaagagttcatctagttatatatttaatattatttgttttagaaacatatttagtaaatagtatatttattaaataatatattaaaatactatttatcaattattgtaaggttgttggcaattttacttttttgtacgtattttgtatttatttaaataactattcttctcaagaaattttctaatattcaacttttttccaccagaaaaggtcgttgattcgggataaatatatacaaaacaataccatttcaagtgatatgctataaaatgaatatcaaatataaataaatacttacaaattatacaaatatcaattctgttgacgcaaggcttcagagtcaaaaattctagtaaaattcattttagattaatataataagataatgcaacttacaataggatattggtggtattataagttttattgttatttatagtaggaagttagtggtactataaattgttattgtattgcttggtcttcttctttttacataactaatatacgaaatacaatattatacagtatactcattttatcttcgaatctttaatatgaattttcataacttttaatcacttactacagtgaatttagattatcaaacataactctaatcatatttcaacaaattctaactcacaaaataaatatataatttttgttcttcttatattattatttagtagttagaacctaatacattcaataagaattttaatgctgtttgtaacctctgacatacacttcaataatcagagaactcataaataaagttttctgttatttaccaccaaaccttattccaagctttatttgaatatactaacaaccggggttcaaacttttggttgtcctaaaccctttaccacagtattgaacaaagattttatttctcaggaattccaaaagaggctttttacaacatacttacaaattcatacattcgcaaatcaatatttcacattcccaactcctacgaaattgcatgagatgatatttcccttgttactattaacacatcaaattcaaatttcaagttatttttgagaatcaacaagtatatttaagatatctttctcttaggaagtactaaaaatatgcatttatgaagcatacatctatcttaaaaatccgtgactatctttcttctctccatagaaaacatatactaaaaaatgtaatgtaaatttttaataaaatttaaggaagaatgagagcagagcaacttcctccttaatgcaatcctgtgctatgagaaatttacataatcattgacgctattggaccttgattttgtcacataaggttatcttccatatacccatgacttactgacaccttaccaattacatttttttaatgtatcagtaccaacgtgcttgataatagataatttttctattgttgctatattcttttgcttgtcagtaattgttacaattaagggctcaacaattgatattgtgagctagatatctacatcaaactattgcaagtattttataccgaatatcaaataaaaatattcaaaaatattcaaataataatcaagctatagaatctacaaatgtgcaatatacatattacaaatatatatcaagcacaatatatatctgttcctacctgatattgacccattttattttattttctactgttatttactaaaatatcaaatccaaatctactttcaaaccagttataaaataaagatataccgatgcataaaagtatatatatgtatatgcatatacaataacgtaaaatatgtgtttactacgcataccactatttcatttcattaaaaaactgctgtttccctcttcaaccatttataagtaattgattgtggttgcatatattgaactaaattgttccatatctttctattatagttattaatttgttccctttcttcagtagttagcatatcgacattaattaattttctacaatatggaaccatagtgatattttcaaattctaggaatggaatatcaccaaatttcaattctggctcgcattccttgactaataagtcattttcaattctaataccatattcaccatctttgtaataaccaggttcattactaatgatattccctgcctctaatgggtatttaactaaatgtggtttgaaaccaatccctataggaccctcgtgaacgtttaagaaagatccaataccatgccctgtaccatgtctgtagtcaagcccatgtgaccataaaaattgtcttgcaatggcatctaaattgtaaccagtagtacctctaggaaatttagttctctccaaggctaagttaccctttaagactaaggtatagttgtcaatttgttcttgagttggttttgtaaagtgtaacgttcttgtaatatctgttgtaccttccaaaaactgagaacctgtgtcacacaaatatatttttgatggatcaatcattgaagaaccttcaattggtggagcataatgaataatagcagaattggcaccggtagaagagattgtttcgaaagagtttccttggaaatttttttgtgtttttctaatttcaactaatttaacagcagctttgtgttcatcaattaatgcttccttaaaaactaactgatgttctaaccatgcaaaatattgaataatacaaagtgcatctttcacctgggccttatgcgcattgtttatttcatttgaattcttaacagatttgaaataatcaattggtgaatgaataactttgtaatcagtgtttataacatgacgtaagatttgccatgaggaagtatctggtattaagaaattatgtgtattcgtggaattatcattatcattttcatttttaatggacaatacagtagtttttaaatggtcccagaatgattcatatgcttttacctggatatcgttttcatcaaaatatttttggatgtcttcattaaatttattattagtaaataagattgtttctttatcattaattaaacaatatgaaaagaatactgggttgtactcaatatctgatcctcttaaatttaacaaccaacatatttcatctaatgcaacaactacaaaagtcctcccatgttttgaatctttcgttttactatttttttgaccatccttatcaccagcatccaatttagataattcttctattagtcttttccttttagattggaaactttcaccagaatactggtctgataagaaaattatgtcactacatggtctctctgggacgacttcaaaatcaccccacatcaaatcaatcaaattttcttcaattggacataactctattttatttccgctcgatgaaatccttttattttcgctatcaatcattttatgtaaattcaaaacagcttcaaaacagatcaatttagggtcaataccaatcttcactacagcaccagaggacaaccctaatgccatttctgaacattcttttatgcaccattctggccaagtaattttatcaacaccttgcctaattagagaccaattgaaatccaactcttgagaggcttgattaaagtacctgccgtctgtggacaaaactgatttcccttcatatctatctggattaaaatttagaagatctcttgtaatacaggcaacaccagcagatccagaaaatccagaaataaaagctcttctttgatcaacaagggctacatattcagattgatgttcatcttcactaggaacaatataacaggccaaatcatgttttgccattagttttctcaattctaataatctcttagatgtgttgatttcctttgtcgtttggcacaatgaatctgaggaataaattgaaacagtatcagtaaatctttctcctgtggctgtgatagtagatagcgaagttgaagttgaagtgttacttctctttgaggttgtagaactcaaatatctattattttccattcttttcatgaaaagagaggatcttctattttgtctagataaaaggcctggagaacaagtacagtcaccacatggccttaagggtcttcctaaacgagatcttgcagtaactgtagttccagaaaaagttgttgttgcagctgcagttgaagatgcacccatgattaatttacaaatataccttttaatattgatttaatcagaaaaagtttcaatatataaataaataataaaaaaaaagaagaaaaaaaacagtataaaagataatgatcaacttctaaacaccttcttttttctttaactaaaaaaaaacactcttatttgactaaatttaaagtaataaaagataaaattctttttgtttgtcttttgtctttcctttacaatgaacagtactttcaataaaagaatatccttgtatatttgattcacccttcagatgatatgaattatgatagtagaaaggagtttacaggttttataagaacagttgttaaataaggaaatccaacaatgaaacaacactcttgagaagaaaaaaaaaataaaagtcgtttattgttgggtttaaatggtttgttttttctttttttttttttttttttttttttattttcttttttgttgattctgtggtgattcttttttgcttctgcaggttatattaaaaatataacgattgttgaaaggagtatctctcactaatggcacgtgacctaattgttggtagtatttatttttttcaaccctctccttgacgagaaagaaaaggtgaaaaaaggtaattgacgatagaaaaataaaataacccctctacgataaaatgaacataaatgaacatgaaggaaatggatcaagatgaaaagagctatgtaatttacaagaaaaaagcagctacaatgataaacctagttggtattttttttgttttatgaattattacttgtttaagaaaaaaaaaattcttttcaagagattgttgctcttatctgtatatattggcttttcttatttgtgtaatcttttgaaagatcccataggctttgaagaaaatatattctcttttccatgccaataaaaaaaaaaagagggtaatcgaagaaccataaatcagtagtaacacaccttacatagaatatctattaagaaagaaaaaaaatatgtatgtattaacataagattattcaatgtatcatattttactagtcttaacaatacatatatatatacatacatctatttgtatatatataataccataacaaccctggtctagagccataaaccttctagataataatttatttatacctcataaccctgaaagtttgattgaaaaaaaaaaaacaattttcgatgacttcataaaaagactctggtgatcacgaggtcttcaggaaaacactcatcccttgcaatattatgtagagtgaacgcaaaatgtcaactctttccacacgaaaaaaaagacagttagcaacaacaaaaactgcacccagaaataaaaatcggttaaccttcaccggatgtccatattaggaaacagttaccatgctaacgggtgaaggatgtacagatgttcaacagctccgagagctagtcacatgactgtaaaggatgtgtggatggacaaaatgtcgtcgataattatctttttctttctttatttgtagtgtgttcctaatgaattttatgtaatatgttgctcctccttttaatctatccctggctaaaaataaatgaataattattaatattaattagcaaaatctatttgacacaagtaactagtatagcgaacgaaataacatagtttttttcttacagtgcatccgtctctacaaaagtaagaacaatcctctctacgacagcctaatgtttaagaatttccgtttttttgttttttttgtaactaagatttatttaaatttatttactgtaccattattcttcacatcacattacttttttatctagtgtaagatgtaactgcattttttgcggatcactgcttatatgtttacttgatgatactcatttcctatcttgtcttatgtgtaaaattatttaattagtaatcaacaaattgaccttttcatttgtttttctctctcaaattccttcggattctaatcaggaatttctccagttcagactaaagtactaataattctatatttaaacaaaaattcaaactttcatgatctttttctgcatttagtcatacacacatacataagtacctatagtcacacacatatgcgagcgtatttgtattgattattccctgttgtttaatactttacggatacttcttgtggttatcttttgttataaaaatacaaaaataaactagagaaaaaacaaccaaccaatagcaacaataaaaaaggcacacaaaaaaaacacattgaaatccaataacccataatactataaattcagataaaattaagaaaataactagtgttattttatcattctgcccaaatcaaaaaacatatgaactccaaagagtaacaacaataacctacaattaaacatgatgaggctgcaacacattccaaataaaattatatttcctatatcgagtagattattagtgaggtctatagtcactccaagtagtgattataggacaagacgatcaaccacaataacaccagtcacaaatactccatcgacgcaatttaaatttaaatttattccaactgtacataacaataacacaaaacctgtgaataaaaatgattccacatcgctatcttcgtccattaaacaaaaaagattaacaagttatagtttaccatctaaaaatattcttgataaacatgaagaaataattgaaactaaagggaactctcaactagcaacattaaataaagtagaagaagtaatggaggacacaagggagagaagagagatcaaacatttaataaatgttcagaatagtatttctatatctgccaattccggcacaactgcaactgcaactgcaacctccaccactactgctatcataccaaaaaagaaaaggaaaagaacattacgcgcaagaaaggcagttattactttaacaccaagagctgtagagcatttgaaaaagttactagacttacctgagcctaagatgattagagtgtcaacaaaaaaccgtggttgttctggaacacaatacgatttatcgtatgtgtcaaaaccagaaaaatttgatgaaatcgtcgaacatgatggagttacaattattattgattcaaaggccttgtttagtgtagtaggaagtgaaatggattggattgataatcaactaaatactaaatttatttttaggaatccgaatgctaagggaacctgtggatgtggtgaaagtttcatgatatagatgaaaaaaaaaaaaaagaaaaaagaaataaaaaacgaaagaacaatttttattgtatcatcgactttagtccattttccagaactgattaataatctatgcatgtatttgtctttattgtgtattcatttatttattcagaaattgttatttatttatttatttattaatcatattccatatctaatgtttaagcaaattgatcttgctttcattaaactatcaacttttactactaagagctcttccatatccccttatcactttaaattaaacagaagcattttctttattctagaaggttcgagaaaagtttgtctttttggttatggaagaatcttccggaatatttgagaacccacaacttcttttctccttctcccaatgatactttagacatcgaaatagaaaaattattcgagaaccttcaggaagtgtctgcgagattttgcaatggtggacaagaaaaaaaaaaggttcctttttgttttctggaaaattaaacaattctttcaaaatttgaaagatctcgagagaacaagaagagcttattttagaaaattgcatcggcataggtagtttccccttaaattttttcatgcagaaagtcttgtaaaaaaaaaaaatccctaaagaaaagtttttaaaaatttagcatagccctagtgtaaattactgtggacatagttgtttttctaagcgtaccctaaaaatatttatttgatttaaaaaataaatctagactgtaaaataattatacaaatccaccactgattgtcccgttgaaggcacctttacaaccttactatattacacaaccttaccattattttgaatgataaatgtaattgtactaaaaaagaaaaacagatataaaaataaagcaaattattatttagttgtcctgtgattgcttgttttgtatgaatattaataatgagaaatggaaacaaacaaattgtttcaaaataagttttttccaatgaaccctaagtctccaccaatattatgttcggaaaaaacaccaaaaaggttgtttaacccgatcattttttccaatgttttatatgtttcttttttcagattaataattttttggcctcaaattttttcaagggggatgtcacttttctaatcttcagaacaactaataacaagtaatctccagttaagggggtacgtaaaggcaatgtgacagggatattacaagagagattcaaaagcatatataaagatctggttttaaatcaaattcaaatataataactctttctagttgtgaaacttcttcttttcttttattcttacaatagctataattcttccattgatacaataaacaaccagaaacaaattaagaaaacctaatatataaattatagatttccaaatgaatgacgaatcgcaattcacagaaaaggcacttactatcttgaccattgcacaaaagttggctcaagatcatcaacatcctcaattgcaaccaatacatatactgggtgcatttgtggagacccctgaggacggtaccatatcatatctacagaatttatttgataaagctcgttatgattatgacagtttcaagagaatagttaacaagaacttggtcaggattccacaacaacatccagctccacaacaaattactccaagttatgctctaggtcaggtgttggagaatgctgctaagattcaacaacaacaaaaggattcatttattgctcaagatcatttactatttgctttatttaaggattcatctattcaacaagtctttaaagaggcttctgtagacatagaatctattaagcaacaggcgttgcaattaagaggtaatcagaagattgactctcgtggtgccgatactaatactccactggaatatttgaataaatatgctgttgatatgactgagcaagctcgtgaaggtaagttagatccagtcattggtcgtgaagaagaaattaggtctaccatcagagtcctagcaaggagaattaaatccaatccatgtcttattggtgaaccaggtatcggtaagacaagtattatcgaaggtatagctgctagaattgtggacaatgatgtccctgagattttgaagaattgtaaattgttcagtttagatcttgctgctttaactgccggtgccaagtataagggtgattttgaagaaagattgaaaggtgttttgaaggagattgaacaatcaaagacgttgatcatccttttcattgatgaaattcatatgttgatgggtaacggtaaggatgatgccgccaatatattgaaaccagctctttccagaggtcacttaaaagttattggtgctaccacaaacaatgaatatagatcaattgtcgaaaaagacggtgctttcgagagaagattccaaaagattgaagtctctgaaccaaccattagacaaaccgtggcaattttaagaggtttgcaacctaaatatgaaattcaccatggtgttaggatattggatagcgcattggttacagctgctcaattagccaaacgttacttaccatatagaagactaccagactctgctttagatttagtggatatctcttgcgctggtgttgctgttgctagagattccaaacctgaagagttagattctaaagaacgtcaattacaactattgaaggtggaaattaaggctttagaaagagacaaggatgctgattctactaccaaggaaaggttacagaaagttagacaaatggaagcttccttggaggaggagttgcaaccattaagacaacgttacaacgaagaaaaacatggtcatgaagaacttacagaagccaagaagaagttagatgaattagagaacaaggcagcagatgctgaacgtagatacgatactgctactgctgctgatttgaggtattttgctattccagatattaagaagcgtattgctgacttagaaaacaaggttgcagaggagcaagaacgtgcaggagctaactctatgatttcaaatgttgttgactctgaaactattgctgaaacagcagctagattaactggtattcctgtaaagaagctatctgaatctgaaaatgaaaaattgattcatatggaaaaggaattgtcttctgaagttattggtcaaatggaagccattaaagctgtttctaatgcagttagattatctagatctggtctttctaacccaagacagccagcttctttcttatttttgggtttatctggtagcggtaaaactgaactggctaaaaccatcgcaagtttccttttcaatgataaggatatgatgattagagtcgattgttctgagttaagtgagaaatactctgtttccaagttattgggtacaacagccggttatgttggttacgatgaaggtggtttcttaaccaatcaacttcaatacaagccatattctgtgcttttatttgatgaagttgaaaaggcccatcccgatgttttaacagtcatgttacaaatgttagatgatggtagaatcacatctggtcaaggtaaaacaattgattgttccaactgtattatcattatgacatctaatttaggtgctcaatacattaatgctcaagaaggttcaaagatcacagatgaaacgaaaaacctggtcatgggtgctgtcaaacaacattttagacctgaatttttaaacagaatttctagcattgttgttttcaacaaactatcaagaaaggctattcataagattgttgatatcagattgaaagaaattgaacaaagatttgaggccaatgacaaacattataagttagatgtctctccagaagccaaagatttcttgactaaatacggttactctgatgatatgggtgcacgtccattgaatagattgattcaaaatgaaattttgaacaggttagccatgaggatcttgaagggtgaaatccatgacaaggaaactgttaaggttagattagttcatggaaagcctcgtggcagtggtgaaaaggaggaccaagaagagaggttggaagttgtacctaaccatgaagccaagactggtggacaagatcaaaactatgattacgatgaagatatggatgttgacgtagattaaagagaaagctgtatatattaaatatattttttaatttactatatattagaatataattattttatgtttgattaggatttcataagtttgttagtaagttattttgtatttcttctgtacggaatgctttttggttatagagtcgaagttataagattagatttagtgaattttttattaaaaaagtggtggctgttttttcatactttccaggctagctttaaaagaactggtaacattataaaaaatatgagtataacttcaaataacaaatgtcacatgcatttggtattctgtattaaatgatggaacatagtttagaagaaaagtgttttactcattgcataaactagagatgaaatctgaaacagtcctctatgactccttaagaagctataataacgattttctaatatataaacagttaaatacattaggattatatggataaaggtaaaagttattatttaaactttaaaaagaagaacaatatgatggtttcggtcaatgttttgaaatatgtttgtgtgtttattttcttcgtttggaggatacgtatttgattgagaagtttatatccatgagaatatatattcaaatttataacatagtttatgtttattttaaaatgatctatattttattgattgtatcgataacttttagagccaaagatattttttgtttgttagtgtagatttacattctaatcaatattgatgactttataaaagttgaatctttatttaaaatttggaaaataggggagaagtaattacaaaaacttagtcatgttaacaagcccacttacattttttgtagaggaaattttatttgagtgtgttttaataattagctcttttccattgaattagtgcaagcacgatagatatttttaagtattgttaatctatattaggataaataatatttgctaagggacaaaatgacagaacaaagcaatataacggataataaagaatttcttaaaacccaagaattaaattcgattaatcaaaagctggaaaagagtcttattgtaaatgttaaaccagtttctcttttagacattcaaaatagagaacagtgtgccgcccttgttgaaaaacaaactgtttttacagaagacattactgaggttttatcaaataatcaagagaaagatgctgatgtatttcaaaatgaaatagtgaaactacatttacaaaatataaataaattagaaaattttagatataagaaagaccatataactatcatatcattcttttctgatgttgattccggtccaagatctactttgatggattctgttcttgtaactccatttcttacatcttttaaaggcccctttattgaaaagcaaatgaaacaggttataagagaaacaaaaacgaaacaatctgatgatgatgatgaacgctttttttccaaagtcgaacattccaataatttgggttccaatttttcaggtttttatatcactatgtggatgatatttggttggactatactacatggtatgatgaactaccttttactaaataattggcaatataatgatattccattagtaaatttaatgacagaaaggttatatattgtgcttataatagatctgtcaatgtggttttcaagttatactgtagttcttattcaaagctttatcaaatggaatttactcttatgggaatctactggtcgatattttaccataacatttgaaatagtttatttttatttcttccattttctggtaattgattatttcaaaatgaattggatttcaagaatatttttctttttacattgtttggtgtatataatgaaaatgcattctttttcattttataatggatacctctggaacattacacatgaagcagccttttccaaatgggcattatctaaatataagaattctgttccatcacctgtacttgctaccttgcaaagaagtcaaacattctgtgaatacgaactttcaacacaatcttcaacaaccgaatttccagctaatatctgctttaaaaactatacattattttgtctttatcctactttagtatatcaaattgattacccaaggtctaaaaagataagatggatgtacgtatttcaaaaattttgtgcagtaattggtgtgctatgtttgatggtcataacttcacaattgtatttatatccatacataacaaacacgataaatatcacttctaatgggggctggccagatttatggacaagtactatctattggttttgtctattagtagatgttttgcctgggttttcgataatttttttattaactttttattttatatgggatgcattattaaattttgttgctgaattaacccaattcactgatagatacttttatggagactggtggaattgtgtttctttttctgaatggtctcgtatttggaatgttccagtccataaatttttgctaagacacatattccatagttctatgaaacactggaaactttcctctactaccgctacgtgggttacatttggactaagttcaatgctacatgagttctccatgtatgttatatttttaaaagtaagaccatatatgtttttattccaaatgagccaaatacccaccacatatttaagtaaaaggacaccgttcaaggaaaacccagctttgtgtaatgttttatttatatttgctatctataccggaatgacaacaatactttgtttatacttggtatattaaaccagattaaaatacaagacacaagaaaatctaagatattgtaaaaaagacaagattctcccttctatcaatttcaatatcttattcagaaatagtatcaaactgttagtagtcgtttgaatatatatcgaatgtatatattaaagacctaccacaatgaactggctcatgtaagatttacttaagaaatacacactattaccagctattacgttaattggttttattttctaagatttcctatttcggtacgtttgtcttttttatctttatctgtgttgtattttgcaggaagcaagcagtataaaaaaaatggtttagccgccctgttcttttttcaaggtgggcggttatagaaactccgatatgacattcttctttcattttttgtatataaagcaaccagatctaatgacttctggaacttaaaatcaatcggtcgtcttttgttcttctctatatttttctgatatgttgagaagttgtggtaattacaactaatattattatctttgttgcatatggttttcattttacctttttttttgtatttaattctactgttattataacatacacagttatcttttaccagctctattaggataatcaaaaacagggtgaacaaaatacaatataccataataaacttatactctccatttttatttctatttttctattaatttattactatatattatattaaccccccccttcctcaaagctatatatattcctagatattttgttgttgttgttgttgttgttgttgttgttgttttatttggttcctacatccatcttatttacatatataaaaacactatttaactaaactattcatttctaaaattgttataccgctttgcaatatagttacaacaaatatatctttcataatatattgacagattttaattttaaataatcttcgttaaaagtcaaaagttgtgttttctagcattaatcaaaaaacatcttttctttactccttcaaataaaggaaacaacatcaaaattagaaagtaagaaagtataaatataaatataaatatatatatatatatatattaatttgctctttgttacatatccaattatggaacaggaaaatttgtgtcaaacattagatttgacatgttccgaaaatgagatttttaaagctagttttgacctgcgtaacctgaaagaaagtgcaaaagatattggatgtaatgaatatatcgactctctactaccaagtgaagtttcttcttcctcagcttcggaggaagatttaagttctattgaagctaatgaaagtaacagtgactcatatgaaacacccctaatacaatcctctggatgtgatgttgatgtatttttaaaagagactaatgaaaataatgttaagttagaggatattccatacaagagacatgatcctataactaaaggaaggccttcctcctgcatatttgttgcttcgttagcagctatattaacagatgatcaactgtgtcattctgttactgaaaaattccaatgttttggaaaattaaacggagttaaagtcttgcgcgatccacagaatagaccttatgcttttgtccaatatacaaacgaccatgatgcacaaagagctctaaatttatcacaaggttccactttaaatgatagagtcattagatgtgaacaagctagagtaaatagaactttgtttgtttcatgctcttcgccaatttcttgtcgagatatcgaatcattttgtgaacagtttggtgaattagagcaattaatccccagttttacttcagatccaaatcaacctaacacaaagaaaaaaaatattcttccaaacttcaggtttgttgaaccggaatcatataaaattgcttgttggttcgtacaatttgcattcagggatgatgctattagagcctttgctaatataaaagcagaactttcatggactgtccattgggttcaaaatgtaaaagtgccaaaaaaatacaatttgctttcgtcttttcaaagatctttatatgaaaaaaatgataataaaaaagatgcttatcatgaatctaatggaaattgtataaataatagaatttccattgatagaaaatctatatttgttggtcaattacacaaggacactacaacagaattattaactaaacattttgaaatatatggaaaaatatttaatttaaaattaattcataagccaactaatatttttgcgtttattgagtacgatgacgaatcttcagcggctatagctttggaaaaggaaaatcattcaacttttcttggcaagactattcatgtgcaatataaagaaatcaataattcatttccatatacgaaaagggaagtaagaacaaatcaacaggaagtattcattggaaagtttaacagtaacggcaatccaattcagcaccataatggtaataagtattttgttagtccacagataactttggctccaccgcctattaatattgctagacgaaaaaatcttggtaatagtaccattgaattatcagtaaataagtttgttccatctccttttagagggtactctaattatagacgcaattcgtatccatttgaatggcagttgcattcacttgaaaatgaattcatagattctcagactaaagccttttctcctaaagatatgtatatggaaattaatcataaagatagagagaatacagaagaaagagaaaatgttaataaaatttcatttgaggaaaaatcctcagatacagttaattcagaatatgatactatggatttaattgaaaatccaactcatgttagcatgacatcctataatgaatcgtcaagagatagttccaaacctggtaaaacaagcaacaaaaacaattataataataacaattataattacaatggtaaatctaatttcaacaattcaaggagaagatactctcatccacctagtccttattatcaaccaaattattttatggcacctaatccataccacagcacatcttctggtaacactccctcatacatgatgtattaccctccaatgccaatgcctccaccagacacattgtcacagcatcagttttttccatttaatccttcaatatcaccatatggttctaatttaatgccaatgatgatgccacagatgcctccactacccttacctcctttatctgttatgcctcgaaattcgaccccatcttcttcaagtgaaaatatttctcaggcaaatgcatatatatttagtgatggaagagattgcgagcatagaagtgagtcaccacatgtatcttttaaagaggatattaacttaattagatcattcagtaatagtgttacaagtttaaatgttttagatggtagtaaggatattaaacacaccggtaaaaagaataatagatttcaaaagattctacgtaatcaagttccgagttttaaaccaagaatgtttaatcaaagagaaagtacaccttttaatgaagaaataccttcagagtttcttgattattgatcttaatatataagatggcaaaaaaaaaaaataaggaggtgttgatgtacaggttgacaataagatcacctatgggaagtaacattatcatatttgctattgatatcatatatatacaaatatatatatagtttaaataataaatctcatcatatttataatttattacaaagtggtattgatatatatgtagtaatatcatataaagcgagatgaaataaagcaaacaaataaaacgacatttaaacagacaggcatgtcacaacaatcaacatctcttataagtatggaagaaaaattaatagcaataataaaaaatccaattatcagattgcttttttagaattagacgaagcggtagattgagcatgttgtgaatttcttggcgttatttgatatttagataattgaattaagtttaattttagagtattataaaatttcttcacagtaggtggaatagatggatgacttattataccatccattcttactctccattgagaaaatacagatgttagatatttggaattttcatatctaatcttcaaaaagatagaataaataatcaaacagatccatgatctttcgtaccacagcaaggctttgaaaataacttgtattaaaatgaccaattcaacagaggctacccaatacaggcatctttcgttgtagtttttgacaaaactttggatcttaacaatccatggattagattggtctaactgaaaaacttgtggtaaaaacacagtttgtaagtatcttagtccatggaaaagagaaaaaataaaatatggtaagatagacaatttgttagcaggcataaataaccatatttgggctaaaataaaatagtagaagttttcatcattcaataaagattttttaattgaatctaaattaaaagaggaattattcttcaaataataatgttgatacagtattataccaaaggattctagcacagccacatagattaacctataaagaaaagtattaccagtcaaaaaacaagcaggagataacaaggtaaccaaaaagtgaccggaaaaccagaaaaattccaaagttttcacaatttctagaaatctatttgttctaccgctatgattgcgattatttgaagttgattgtgccattttgcttgttgatgatctctcggatgcagtgagactgtgaatagtttggcaagtattcatgtatgaaacttttttctaaagaacacagtgcacctttttatttgtttgtgtgtgtttaagtgtttttttttctttttctactttttaccttattattatagtaagatttagaaaggaaaaaaaaaggaaaggaaaagaaagcaattaaaaaaataaaggttgttgttggcaaaattaggtctaagcaaaaccctaacaaaagaaatgaggttcaaagcctttagacaaaagatataaaatggaagtaaaataaagactatatatatatatatatattgaatgtgtgtgtgtgtgtatttatatgcatgcatttatttattttttttattattatatgatggtaatttttaatatatgaaagacgtttcattttctttttggtttctttttttgaattaagttggataaatcattaacattgtctatcttaattgtatctgtggatatttgtcctaatgctcttttcaacacattatcaaaatctggatgtaaggatctgatatcatttgtacgacttccctgtaatttcaattcgtgtaattcttcttttaaaccgggtaaaattggaatatattcgtcatctttagaggattttattaattttatggcttctatcaaagatttcttgtaaattttaaaataataatctgatttttccataggttgatcagtccatttgattagttctgtgatcttcagtaaaatagatatctttagattcgtattattcatctgttcgcagctagccaatgctagattataataattcagagagtttttgatatcatctaattctttaaaacaatctgctaggatagtatataatttaatcagactagttttatcattagtattattcatctttgtatttattatagataatatgaattcaatcattaaacggaaaactgctctaccttctttcataaagtcattaaaatctgtaatgcttatagaattgttatcatcactatcaataacctgattattagattcctcattcgtaaagtcaatttcatcatcttcttttaaaccaaattggaaaaatttagtatttttaagatgtttctcgtcattttcattttcaatattctcctcctcctcctcctcctcctcctcttcttctgtatctatttcatagtcatcctcactgttaccagcaaagatattattttgattgacttccaaagcatacccaaataacgattgaagaaattctataacaagtggtaaattctgataaaacgtatcatctataactattgcttggtctacattatccttgtcactatttctaacaaaacatttgttcattaatggaacccaatatgacatagattttttcagttcattattttttgaagagaaaactgcatctttgtataattggtcatcggaatacgatatcatattacttttatttatttatttatttttttaattgctcagctttggcttgaatagagagtattgtaaaagacaaatgacgaccggacttcttacagttttagacaacagcttgtttcatttaaaaaagaaaattgatgttaattttaaatataatttttgagaattggtaatttccttttatttatctttttttttttttttttaattttttctcttttagatatatcaccactttaccgaagtaattaatgatgttactcctttatttcttgctatatttctaactgtttaaaagaaaaaaaaacgcgtcaactttttcgcgttgcaatctcctcaaacaagaaaaaaaaaaaaaccatagtggaatattaggaagaaatccccgatggatttcctactttggcggctaattacatatccaatatatatacatatacatatacatatataatggtggatttgtttcttactgaaatatgtcttccttgaatgaatccacacgataatatgtttaaaatctcctgaatgcaagatcaatactgtatcgataaataaatacaataattaaaaaaagcaaaagaaaagattagtatgattattatacatgtttttcttattcttgtattttatgagatgatagcataatatattttcttggtcgaatattaacatacaaacaaaagaaaaaaaaaaaagaaaaaaaatctttagcaagaatatactgtgtttgggaaatatatatatatatatatttgactaggatatttcattaaacacatatttttcaataggtgggtttctttttcccccatactctttttagtcaacgtttagaagaattgaaacgacaaattatgaaacgcacgaagcaaaaaaattaacataagaaaaaaataaaacaactaaatcaatgaggtggttttatttagtagttttatctattttcttttttatttatttatttatttatttattagaactttatatattgatgaaacctgttcagaactaatcatgcagcattttcagacaagaatagtgatattcttttagaagtaaggaatgccgattgggaaaccagacgtttcttttcttttggatcgttttttgaaacgttttttgttttttctgccataccatcaaattccggaattgtggacggttttgccggaattctttttttttttttttttttttttttttattttcttttttagccgagaagaaattttaacagttaaacaaaaaaaaaaaaagagaatattgtttgtgtaatattccctttgccaaaatttctcgatgagcataacaaaagtaatttcgaccaagaacaaaaaacaaaaacaaaaacaaaaaaaaaaataaagaaataaataggcacgattgttaagataaaacaaaaacaaagtttaaaaataatattaatatactatcaaggtttaatatattaatgttaaaggttgttgaagaaaaaaaaagtattcattataaaagaacaaacatcattcaaaacaaacaaacaaacaaataaataatagaaattcattttcactgaactgtctaactatcataacttctaataatcaaccagataaaggacttcacaattcctacaacaacttaaaaagaaaaaagaataaaaaaaaggaaaagataataaaaaatataaataaaaataaaaataatcgaaaaaaaaaagagagagacatgacttcccagacggaacaaaaacctttaccataccatgaagaaatacatcaatattttttaaagttatcaaatttcttgaatattgccactacagaaaattctaatgctaatcaaaaagttactaaggatcgctcaaactctgtaagagctcagaaagctagagctaaattattaaagttatcaccattacaattctacgaactttgtacagacgttactgatgaattgaacagaagaataaaagagaatgtaactaaaaacgagaataataataataataataataataataataataataataataacacctctactacaaataataatcaagatgataaaagtaaagattatttattaccgaaattaaattatcacgtaaagagaaaccaagcaagacaaaaattgtctaacctctcacaattaaggtttaatgatttaattgatgatattttattcgaaatgcggagaagaggatatcatatcattatatttggtaatgaaaatgtaccagactctaaaacgtcctctccagaaatcaacaattctcaaaatatcaatacaaatagaccagaaaatcaagaaaatagtaaatatgacttatctaataataataataatactgaacgtacaattgattcaaatatcactgttcctttgccttcagtgattcaatcatccttaataataccccaaaaagcttctattgattggtcagaagaagaagaagaggaagaggatgagaaagaagaggaacgcaaaaaagaacaagaccacgaggaggataaatctaaaactaataattctgaaaatatgatgataaataaaccaaaagaagaagcatatacagatcaaaggaagttgaaacctaattattttcaaaatgaagagtttgatcctaccagtgataatgaactcgacagtggtaatacaactgaggatcttattagatctaactcgatgaaaaatccgtttaattcttctactaatgatacaattaatactgtttcagaagatggtgttattaatatagcaagtctcaaatcaaataatcccttaacatcaccacctgatgtgagaaatactacaaacaatgaggagagtattgatgataagactaaaatatctattggtatacctaaagtctatgatacaaaccgtgaaaatgttggtgataaccaatcactcaatgaaaaggataataagttgggtgtggctgatcagttattagtacaagagaaatatgaagacctttcaatggaaccatctaagcaaagttcaaatattttgtctctttctgtagaacaacctactgatccttcccttctacagtcgccaagttctatctcacacttacagaatgaattaatagtattaaataaacaattaacatctctgtctattgagaatgaaaaactaaaaaccaaaatctctgaactagaagtgatgaatagtagtcaacaaaatttaaataatgataataacacatttcactctcccaacactttagctactacagatattgagaaaaataactatattctttcttctttaaaacatgacaatatttctcaatttatcaaagaatatggtatcattcctgaaacattaattgtcaaattgtacaatgttgtgaatgagctatatactcacattgatagcaccagaaaaaatagtacgaatttaactaacatgaccaacagcattagtttcggtaaaatgctttttcaactaattaaccaattctatagtattattttgaagatcattgatttgttaactcaatcaggagaaaaagatacaattgtgctattaaaatcaacattttcaaatttaatcacaacatcgaaatattttgctttatattatcgtatccttcctaatattgttattatatcgtctatcaatgaatgtattttcatcattatggacatcatcaatatcttaaaggttaagagagatacaacagtaatggcagagaattcttctaaagaaacgaatattcttagcttaaaaataagtggagatctatcagaaatgccattgacaacatcctctgatttaaccagaaataatcatatgggtgacataaatagtttagagaattctccagtgaagcctcttagaataattgaaaaagttgcaagtagtcctttaatcacaggggttagtagtaatgactcaaaaactgtagttgctgcagcaaggaaaccatctaataatgtgttgttatcattaacaagtatggtgaaaaaaaattcaaccgaaaaattgattgttaataaaggtagtaaaaacacaaaaaatagtgaaattgtttctgacacttctgttaatatgctagttcaaagaagtaccccaaacttggttaaaaagatggcatttgattcatcctcgacaagttcttcttctgatagtgagagcaataatagtaatgatgatgatgatgatacacatgatttgttacaggagttgaggaagcagaaagaggaagtagattcacagctgcaagaagcttcatctcctaatgaggatacaaatagttgttctgtgaagactttacataatgatgataaagtatgtcatagcaatttaagaccagctataggatttgacgacaaaaatacattagaagaagaactatctgataagcatgaattagcaaaggaggagtcagtagaaagagaatcagatatacctagaagaagtacgtctaatgagagtgatactattcccgatataaagatgaacaatgggtcggatctgcaagttagtcaaccaaatattaaagctaactctcaacccaacctcatatcctctcataacaatgaatccacctctgatgctgcatcatatgcaactacaaataatgagttaccttctgagatcaatgtgtatccttcttcacatacaccaagtgtgaatatgataccctcatcatcctcaaataataatattttgaaacctacaagtattcaaaaagtcacagatattgacaagaggaatagcaactttgaaagctcaaacattcaaaatgaaaatgaaaatattgcaattgataatagtatttcttctgaaaagagagaggaggttagaagtaataacgatgatgtagtcttacaatctaacaaaagtgctgataaaccagatgaaccaactcttgttaaagaggaaacatatgtttcttcaaaggttggcaattcttctttatcacataacccaaatacaaatccatcattagagtcgaatacttcaccaataattaaaccattcaaaattacaaagctagaagctcgttcattgaaaaaagttaatttatcttcaaaagatatcaacaatgagagtatacctggtcttggtataacacttggtgaaagtactgatagttctagtaaagctaataatatgaataaggttgagaccaattcagaattatctgatgataaggaaatgaaattgcaaagtaatgataaaaaatatgataataatagaaatatacatgaccatgtgttctccaacactatctcaacggataaaaagaaagaggatattgttattaatgaaaatttagaaaacacccaaatggatcgttttgatatattggaaagtaaaccatctaatatagaacttcaaaatagtgataaattaaaaatgccagattcacatgtgactaatgaggaaagtttaaatgaaaactattcgcgtcaaccttcagtgactatacatcccttagaatcaataaatcagcagtttttagaaaagaaaaatgttgtgggaggtgataataaccaatataacgataaagatgttgattctcgcatatctcatgatagtttagatttaaatcaaaccaaggatgaaagagaattggctgatttggaagaaactcctaagccgcttaaactcaaacaacatgagcaaattcatggagatacacctaagcattcatctatagaagagaatttacatcatatatcagatagatctataaaaaatgataatgaacttgataatgatccaattatggacgatgatggcatccaaactatttcatcacaaggcaaaaatgttaatggtatgtcaaaggaagctagtgtaaaagatagtccggtcagcaagaaagaagagtcgtcattaataaataaagcagaggaagcgaaaatggcaaataatatttctgaagatagtgctaataatctagaaagtggctcggaggaggaaagtggtactgaaagctctgaatctgaatcagctacggcctcagattccgattccgactttgaatctggatcagattccaccgaaggagcagattatgatagtgaggaagaagatgaggaagaagctgaaacagattttgatgtcgaagcatttgatatcgaaaatccagataatacactatctgagttactattgtatttagaacatcaaactgttcaagttattactacgatccagtcactgttagcttctataaaacaacctaaatctacgaaaggtaatttaaggacagaatcaaatgcaattaaccaagtcattaaacaaatggttggtgctacttcgatttcaatgaatcaaagcagaaatgcaaatttgaaagaacatggtagttgggttgttcaaagtttggaagattgctcacgtcgtatgataacattgtgtcaactaaatcccgatggcgagattgaagttatggataatgatacagattatgctgataagaatttcaagcaaagattggcaggcatagcttttgatattgccaaatgtactaaggaattagtcaagactgttgaagaagctagtttaaaggaagagattgaatacttaaattccaaaattcacgaaaaataatcaatggatactcttttggtgtatgtgtatgcatttatttatatgtcaaaatattattttaacgagaaatagttttaaaatttgattacagttgaaatttggtggtattttatcataagttggtcgctaattgtatgtgttagtttctagatttttattttgtcttattagctaattttcagattttcagtaaaagagtgtatatttatagaatacaaggcatgctaaaagatagatactgtctcttttacaatatttgttcatatatatgcctttgtgtgagagagactaaataatctgttcaaaaaagcatgacggtaaaacttgatatagatgtcatgatctaatgaaacatttagtgtaataatatcacattttttatagatactttatcaatttatttttaatatataaaactttagatagtaacaataatatataggaaaatttttgtaaacattagagttatgaaagtaatattgaaaagaaaaaaaataatgacccagaatataatatatgactccgtagaattggaaaattaaacaaaaattaaattgaaaacatcagtaagagaatatgaacaaatagagaatataaaataaagtaaagtaaaaaaaacataaaccctagccctaaacaatcaaaaagaaaacaccaaaactagataattttgtttaaaaaatgtagtatacaagaataacaataataatgatataccaaataaaatgcaaatataacttcatgaaatgaaattaataaaataaaaaaagtaacgagctttgagttgtgaattagttcattattgtagaattgaaactatcactttcaaaattggaaataccatcatctaatatccctaaattaaaccattcgtgatttaaagcttcttttgcagagattcttttggttggatcaaattcgaacatttttctcatcaagtctacaaaccaataccaaaataagaaagtttcacggtcaatctgatactggttatcactttgaataatattgttatttcctcgtgagtataatgagcccttaatcaaattccaattttgtcttggtgtcaaattccaattgattgaaaaatgcttgttattgtactccaattttaatattttagataccatcatatccaatcgatcacaagaattcatgactcgcttaattgatttcaaaggcgtgatcgtttctcctgttcttttattaacttcaggccaaatcagttgatatgaatttctatcgaaatgttttaaaacagtggaatttaaatcctgtggtagattacccaacttatgtttatatttatagaatgatttttcaactaacttaactgggattctctcgccattaattctttccatcatggccagatgttcgaaattttcatgtataggatacaaggactcaccaagcactagttctattagaatgcatgcaatagaccaaatatcacaagggtacgaccaacctagtcccaggacaatttcgggggctctataatgtctagttgaaatgacaggtggatgatactcattaacaaagattgcactaccgaaatcgataatttttatctctggattttttaagatttttctcatgccattattacttgccaattttcttcttgttgataaagtttctactatttctgggggcagttgatattcgttaaaggattcgtcacatagtagaatattttctggttttaaatctgtgtgaatgatccccaagtcgtgtaagaagcaagttgatctaatcaattgtcttgcaatggcttggatatgagatccaggaaatcttgcaataccatttgaacacataaaatcatatattgatttcccatagaggttagtgaccagacagatatggtctttataatcgaaatactcctttagtagcagacattggaactggccagttgggtcattatttaggatagtagaaagtattctcaattctgtcttggcggcttctctatatctatcaattgatctaataattttgactgctaccaattgatttgcgtaagtatctaagcatttcaataccttaccaaaagttccttgtcccagtaactgtaaggatttgaattggttgccgtttggaccaaaataatcgtcaatttggaaaatataatggccatctttatcagtttgaaaagatttagaatttttgagatcagcagcagaggaagtggaagtagttgctgttgttgctgttgttgttgttgaattggtagtggatatatttatgatggaggagttagagctattattattattattattgttgttgttgttgttgttgttgttgttgttgttgttgttattgttattattattattagaagtgttccaaattttatttaatttaatttttctatttccttctaaagtaagtgcgcttgatccagtcaaatataataagtcgttatcattctgtgaagtatgaggggtacgaatactactgtttccactgccaccaatgttaccatttttgtctaaagtattgtttaaattatctgtttgtaggttgctattattgttaaagtagttcaatttgacatggggtagttgaggtaaagagatggttctttgttttttgacaggataataggaataaaaggagtttggttgaaaaccaacaggttgttgttttaaaaaaatgagatcatcatcttggttgtgatcgtcctggataaggacgttgtcgttgttattttgttgttcttgatcactattatcatctattgcaatttcataatatttctgtatatttgagtcatttagatttaaaccgtgagtcagattattattgaagagagtagattgtttgaacgacatatcttccaataattgagaattattattattattattattattattattattattattattattattattttgtatagaatcagaggtagaggtagaagtattatttgaagttattgtttgatccaatagagtattaatagattgtggattaggtataatattcatgttcatgttcatattatcataatttaaagcagcggctgtattattagtaatgctattatttcttaatcttttccttgtagttttagtgatttgaattggatcagacataataattttattctttgtgtatagatatatagatattacctaataatactgtatgaccaaaaacgaaaatgctgatataaatagataggtttatctacctaatactctatcttatagccttctttgttcaaataaaaaataaaaataaaaataaaacttacacctagactaaagtaaaataatcaatcaattaatgaatctcacttatcgcaaagtgagaaattatttgaggaaggaggaaggagaaagaaaaaggataaaaaaagtaaaagtataaacttctttgatcttgggagaagagcaaggggggggaaggggaaagagaaaaaggagaagatggaaggttggttttagaattacataagcttacaaaatcacgaataatgaatagtgtttgttaaaaactgattacacagaaggaggatgaggcaggggggaggggggcgaggttaaaaaagtttgaagctaaagactatactcttactctatataccgttctatatacaaccaaccgaccgatcaatcagccaaccaacatacgtatgttatgacgattcacagtaggaaagtgataaccatatggttatgactacatgaggtcactattgtactctactttactagtgttgctgctgctgctgctgctacaccattacaattcatggtatatggctaatacttcaaattgccaactgctctgttgtatagtgttgtgtagtgttgttcgttcgttcgttcgttgcgaccaccacaaaccaccaaagagacagacacagggaggtcatgtgacagagagtagtcgtctccacctttattgttcacacaaggggaagaaaagaaaagaaaagaaaaaaaccgctcaacgctgcatgcaacaaacaagaaactgcagcaagagtaacaacagcaaaagaatagtgggttttttgctttgattttgggttttgaactttggtttttctgctttctgctgtaattttttttttgttctggccagacgttgtcgcaagaaacttcgctccctttctctccccttatttttttctgttttgtttgcattgttgcttcttctccccgccctttttttgtatatatatatataatttctttcttttttcctccccttttcttctgtattcgttctttgtgtttggcgcctgtgattgtggctgtggtcgttcgacgtggtgttgggatgttgtgagtgtagggatggtcaattgtcacagccacacaagagaaaggaatagagggggggggtgtgtggatgtattacgtgcttcatcttttgcagtctaaagatcggctggaagtctagaacccgccagcgtggttcttttcccctgtctccccgttccactggctagtgttgataaaaaaaaaaaaaaagcagagcacacaattaacaactattactgctttctctttacgtcatataactctgatatttatgaatctcaatatcatgtatgacgttgaaaggaaaacggttattgtattgtgatattcataatgatcatcacacgcattgccagtatcagtatcagcatcactatcactattaatatcagtaataatattattaatattattatttacatgtttgtgtgtatttttcttttcttaataattatatatagaatgttcacaatagaataaaagaataccctttttcataagtccaaccttgctatactgttttgttttgtggaacacaattattatgtctaatataataaaaaagtaaaaaaaaaaaaaaaaaaaaaagaccgaaatttttctatggttttgttaatttgttttttcttcttacatgttgttcccttttaaagaggggtggggagaccgtggagtagagcagctaagcagcgtttcctagctagttgtaataaagaggctgcttcatctgtcaactgccccagtttcttctatcttcttctctttatacagtatttgaaattattgatcactacttgttatccttgttcttgttcaaatccctattcatattcacgttttctttttctttttcttttttgtttatatcactaggtaatcccaaatgggaccactcgtctggcgtcattaaccctcgctccattctacaacgaaggtattccttggctaataatctacaatttggtgcgttctcgttattcaccagtttcatacacttcaaatatcgcagcatcatatctcgacattctccatcatgatctaatgggaacgatccacgttccggtggtgttggtaataacgctctcatagaattccctggattcccactcattctttcctaaactcttatattcctatatgtatatattataggttactactctttttttttgtatatatatatatatattcaaaaggtgttactattacaaatagactctgtatataaacaataaaaaaggacttgtcccttctatctttttcttatatatatatatatatatatgaacacgttttttctaattcttttatgaatcatcttctcctttgctttccttttttagtaaggataaaaattaaaaaaaatgaaaaaataaaaattgaaaaataaaaatatagaagatctgtcaaatcatatatatatatatatatatatatacatacataaatacatacatatagtttcatacatatatatacatatataggaagaagagggaatgatgtaggagagagtaaagtattaattgtggataacgtgaaaggagaaaaaaagaaaattctacacatacccatgtattatattatattttatttcattttattttattttattttgtcttattctattttttttttttgcatcatggtcttaatctctttggatctcttgggaatagcgaggaacgtctgatatttttcaaatccaagaaaaacataacaattctctctaaaccgaaaccagcacctccatgtggtgcacatccgtatgtaaatgattcaacataatccttcaacccaggatcttctggggacaacccatgtgctttcattctttccttcaatagttcaggatcgtggatacgttgagcaccggataaaatctcctctcctctcataaagaaatcgtacgaattagaatagttagcatcttccgcgtctggcatcgtgtagaatggtctgacagccaatgggaacttgtccaagatatagaaatctgtgtcatacttctcacgcactaacttaccaagtaacttttcgttttctgtggataaatcttcgaaatccccgatctctttgcctgcctctctcaacatggctacaccttccttgtatgtaagcttgaccactttaccgttctctggaagtttgaattcctccataggaaactgtttacggaccaattcgatctccttgccgaatctattcttcaattctttgaaaataaacaaacataactcgcttagcacgtccaacacttcatggtagtgttcctcaaaagtcatctctaaatcaagacctgtaaactcagtcaaatgacggtgtgtattcgagttctcagcacggaaaactggaccgatttcaaagactctttcaaaatcagcaaccatcaattgttgcttgtaaaattgtggggattgtgccaaataggctttgtttttgaaataggtcacttcaaagacattggcaccaccttcagatgcagcacccaacaattttggtgtatggatctctgtgaagtttttttgcaacaaaaactccctgaacaacgaacaaacaccgctttggatcttgaagatcgcttggttggtcacggttcttagatcaatgacacgagcatccaatctggtatccaagttgacaactggtaaaccagcatcctccgcctccttttcagaacgagaggcatcttccaaaagaattggcaaggtctctggtgtctcagagattgtgaaaatttctttgacatggatctctaaatcttgaatggtggcactcttgatcaattcgtcgactttcgtaacaataccacgaacaaacacgatgctttctaaattcaaggaaccacaccatttaaccatttgcttggatacagaaccatcctctttgttgattttgactagaccttgaatcaattcagactgttgtctgaaagtcaaaaaggttaaagtggcaccttgttgtctagtgttatggacacgagctctgaaacagacttctttgccagcatcagtttcactattcaatccattgaacttaattctcttttcgtttgtacgagtggcactttggattaaaggcaacttgccgtagtgagaagaggctgtatcggatagttggttcgccttttcacgttccaacttttccttttccaattgcgcagcacgttcagctttcttcttcaatttttcttgttctttcaaatacttcttcattgctttcttggataatggctggccatcttcacctaaaataactgggacttgttcagtcttttcagttgaagctttggcattttcagctggtttagtggtttcctccgacatcttatacctctttcttccttccggttctcttttatatctgtttaatatatattctattaaaggaataattcaattcaagacatgacattatcaaaatctggatatagttgcatgtgacaagagaaatgagcgttcattttatctttactgtataatacaaccttgtataattgaacgaaaaacagaaaaagaaaaagaaaaagaaaagtaaaatgaataaatgaataaaatttgggttgtcgagctttctttttctttcgaattatgcgtcgtttttatttttttttttttccgtttgacgataaatgaagaaaaagtcaaaaaaaaaataaaataaaacagaaatggaaatggaaatggaaaaaaaagaaaaaacctttcttttttctttttttatttttttgtaatttttttcattctcgaaaatgtcaaacaacagatgtttctgtttattatcagaggaataaggtggaaaaaaagaaaaaccctagaattattcttccataggcaagcaaccctaattttattgttcatttaagtgtggtaaaacaggcagaaaagaaaagaaaaaaagcaaagcaaaacaaaacaaaagaaaacaaaaggagggcccccctccaccactctaagtcctaatttcaagacgcgaaaagacgtttgtatctttgctgcacaatttgcattcatacacccaaaagttttctgtcttaacaccgaatctccagtttttttcttattttgtttttacttttttattgttcttcaaatgtcattacttcgtccatccagctttttttttttgtccggtatttttgtgtctttgcaccagaaaacaataaaattactccatttcataggttttgtttttgttttggctatgtctcttttttcttttcctattgtgagtaatttttccttcatcgatgcttcagaatcaagatcggttgtttttcattttattttaaagattgttgaaatgaaataattgtaaaagtaaacatcgccttctcggatccacataaaaacaagatggaaactgttttatcaaactgtcattttctcgttgttgttgttgttgttgttttttttttctcttggtattttgatatcctatttctaatgcacttctgtgtatttatatatccgatttttcttgatttgttttaatcctttttctttctttcttaaaagagagaatctacgcattcttggctttatatttatcttcgtccgtatatatatatacatttgcattctccaccgtacatccatatatatcaaattttatatccatagatccatttatatgtcttaagttaaatttttaatgaaaaacactttttgttaatttattatacaatacaaaaacaaaaaaaggttaactggatatataataataaactatcagatatctcttcccaataacaaaattctaacaagaagataacgaactcctaactatatttctttttttttttgtttttttctttatttttttttttttttttttttgaggtttgaaatttaaaatgccaatttatagtaatcagtgtaatgagaattataaaatattaaatattggatatgtccttgaatcatatcattctctctcagctcattcggaccctaaagttaatattctttcgctgaaaaaacatgaaataatttttattcttgatgtttcgaaaaaaggttggttagatgttattaccattaatgaaggtaaaaatctgtatagaggctggtttccacaaaattatgttaaggttataaacgacgtcaagataaaaaatttacattttaataaactatctaatttactctctgtctcgaattctttttcttcttcttcttcttcttcttcttcttcttcttcttcttcttcttcttcttcgttgtctgaacctttaacagtgaatacgaatataaatgttacaacacaaatgcgaaatctcgatcctatgaataaaatagatccgctatctacttggaattttgttgatggcagtgatagaaatcaaaacagaaatattaataataataatgataaacatgaaagtataaacgccatggaaccttctttaagggtaggattggatctattgagagattataagctatatacaaaaacacagattgaaagggatttctataatcaatgtctatttccaaatgataagttttgtaggaaacctgtaatctggcaaataatggaaaatggtcagaataaagatcagaacaaaaaccatagattaatatattataatcatgatttaaagatgtactgttatgaattacctgttttgatccatcaaatgtgggaaagagaaaaaatcgattcaatggttaatttaaaggattcgaaattgtatttagctaaaaacgatacattcattttgaatccaaacgattccatttcaatctcagatatatttgaaaacgcattatattgctctactgtattgaaaagtgtctggttaacaagagataaactgaaaatagcaaaatatttaaaatcaatgtctttaactgtgacttatatagttttgattataagacattttgaaccgtatttcttatcttctgtaaagaaagagtcacgacaattattaaaatcaattttaaaatattcttcgttaattaaaataaatgccaatattcattgtacaaaggacttgttccaaaatttttctaattctaataccgccactggaaacaaacagcaatctatctttggagataatcaagagacttttaatgcttctgatgttattaacatggatgtatcgccatgttttgtaaaattttatggatataaccaggacagaaatgattctgtcaccactaatgaaacaatatattcgaacaatacgttagtaccgccctcatgttcctataatgcacaattttgtaaccgtaatacaagtatttcatccatatatagcaaaaacagtacaatagacttgtcgcctaaacggacctcagagacgtttattaatgtggagaccttacaaagaattaaggatttgatgtttgcacatgttgatagtttacaaaattcaattcagttattatattactttatcaacaattgtgtcaatttgcccaatgagcgtacgttatctttaccacaactttttcctaggttttttattgattcatatagtaaagaaaattggacaagtataatatcaaatcatttaactccaagtgactctgttacaaccatgtctacagttgaaggtttgttttccaaaaagtctgttacttcattatctagtatgacatcttttggatctgttgataccgaaaatatgatgagtttgaataatcatcaatgtttaaaggataacttacagcaaactagtaacgaagatgaattatctgcggtaaatctgaatggtactattgctaaaaataaatgcttcgctttatcgtcatcaaatgtaaatattactggtaaatctgcatcatttttaggaaagaatttgagaccctcacttaataagtatgactctacctctggtcaaagtagatattgtaatttgattactaaaaagagaacagaatttagaagtaaaatatacccactaaatcgtgatacattaaatattatgatgaccagaaaggaaactgtgtataatgatatgcttgattttatgatgtctaccgctgagtctaaaccgaatattaatgaaatactgaaaatttatactgaattaaatgatcacaatgttaatatttatattctagaacatttggatttaaccttttttgctaatttgaaaaatattatagataatggggatcccaatgatgaaagcattaagttgttgaatcattctacaagtaatattatgttcttaattaataattattttgaagtgaaacaatggcttcatgatatatctgttgagctgacaatggtcacacaggaagtcactttggaggattcaaaagtattccaatcaatgttacctttccatgaagttggatcaatggaaagtattcagattgatgattttaatttttcaagaaatgggtttcaagaaaataaagatacctttaaggacgatcgacttgcaatgcgcttttatgaatgtttggttagagatgatgtggatgtggaaactatggatattctaaatatatacgatgaattcaaatatgtttattccaaatattacgatatcaactccatggcttattctacagtagagaaattattagaagaaaaagagaggattataaactattgtgctagaactatgcaagatatattgattcgagagttacaaaagagagagtttaatgatacagagtggtttgaatccaattatatcaaggagcaaaacttcaattcaaatgttgtaaatagggctggaacctatgatgatatatctccatggtactttaaatcggactccgagttaccaatgatgctggatcaaacgggtaggaacattaaatttgccactagagaagcattagtaaattatttgctttttagcaattacgatggttcgatagatacaaaattcatgcatgtttttttattaacaatgaaaagtatatttccctctgctacagaaatgttattagtaattattgataaatataatacagagcctccagaaggtttaaagtataatgaatatactgagtggacagaaaaaaaattagttccaatgaaaaagaatgttgttaaaatactagatgaatttttaaaaagatattggatttctgactattgggaaccaaatctagaattgattcttatggaggtgtcaagtcgaattgaagctgacaatattgatggttctgatcttttgttagatagcatcaaaagagtcattcgtaattgtaaaaaagctattgttcatgatccaaaagaactattgaattgtagtaatcagttacttgttccttcgaagagcgtgaagcatttgaaactttttaacatagcgtcagctcaatttgcacaacaaataactttgatgaatcatgaaatgtattgtaaaattactgcctttgagtgtttggataaaatatgggggaaacaaaagaatcatgggtttggaggttctaaaaatatcagtgaatttattgaacatgcaaattttatgactaactacgtttcttataaagttgttaaacaaactgatgttaaaaagagagttaaggttatcaattattttatatcagtcgccctgcattgtcaaaaattgtgtaattttgctacattgacagctattctgtcaggtctatattcatctcctgtttacagattaaaaaagacatggaatgaagtttctaatgaatcaaaagaaatccttcaaaagttagatcatttaatggattctaagaaaaattttttaaactatagaatgtgtttaaaagcaattcctgaaaaggttgcttgtgttccattttttggtgtgtacttatcagatttaacgtttgtcgatgcaggtaatcaagattcttctgaaatgatcaactttcataagagagtgatgatttatgatattattgataaaattgagagttttcaaaagagaacatattcaaatgtgttagctaaaaacaatgatgtgcaaacatttattcttgattcattggaaggtgttcctgatcttgatgaacagtatcgattatccttgcaaattgaaccaagagataactcaaaaacacagagaagaaggaagactataagtaccacaaaattatggaaaaataggcctggcatgaaattatttggataaacacttatagacttcaaatattgcatatttgcattcaatatatatatgtatagagggttattcatttaataattgtatagtgcatatttattgtaaagaaattataaaatcacatattaattgatgaggtttatgaaggtatgttaggtaatgttgaatatttactcaagggaggaattgtttacttaatatatggttaaggataagggaaaactcttgtaagcacgattcaagtattacaccttatacagttatactgtttttaaaacttacaacaatgttggttgacattacataaaattggcttaatcaaaaattacaagttcctactttatgtaattcaatattaattcacggttgtaactcaagtggttacagtgtaggttaaagataataaaaaggcttttttttatatcatggatatataagtatgtgtaaatacaaatatctttcaacttattttttattataatgttagtaataaaataatcacctctaactgtgttaaagagtttatttttgtcttgttgtatatctaatatttttattcatacttgttaaagcattattttttgaatcagttctcttttctttacatttatgttttataggtggacgttttttctttttaaaaagtctgtaatttcacgtaaactgcaaaaacatgcaaaagatcgtagcgacataaaaaatacacatcagaagagtagaccttgttattattaccgttgtatcttacttggtagtttcaatcaataagggacgagctatatatagttaattttcttttactcttttctttgctacacagttttatagagtgtttttaactctcaaattgctataaataatcattgtggtcattctcgataaagcaataatgtttaagcaactctcccagctaggtaaaaatttgactgatgaattacaaaaggggttatccgatgagttattatctgtcaatggttcagacactaatttaggtttaaatggacccaatgtgtcatcaagtagtaatatcgataagaacttgcctgcagatgttcaaacaaaattgaggaaatttgagaagtatgaatctaaatatccattattactaactgcttataagaatgagaaggtgaaaaatgaaaagttggaagttttacaaaaaatattgactgaaaatacacctatttcagattttagtgatatcgaaacatcattacctagctattttgaggatattagtaataagtttaacattttaaatgaagaaattaaaaggttaaataagttacaaaaagcaaaaaatgaattatctagcactaatgaaactgccattacaccacatgatgattcattggttgaaaactataaggcagagatagaagaattaaaatcaaaattagataaatataagggaaatgaaaaagataatcaagaaaccaatgaacttctaaaagcacaaagaactgaaattgcaaatttaaacaaaaaagtattatctataaatacgaaacatgaacaagaagtaaacacttttcaaaaacaggcttctaatcaattagaagaagtgaaggccaaattacaatcggaattaactgattataaaaatcaactcaatagaactatacaagaagctaaagtctataagaaacaaattgaagaatttaattccaaagtgtcagatatagaaacggaattaaaaaaagaacgtgataattctacatctcttctagagcagaagaacaacgatattaaaaaaataactacagaatttgaagcatcaaaagagaaagttactgaattaacaaatattatatctgctaaggagactgaaattgctaatgttaattcagatttgtctcaaagagtagaagaaataaataaactaacagagcaaagtgcaaactattctagtgaggtggagcaattaaaagagcaaattgagtcacttaaaacggagttaaaaagtaaatcaccaagggacgatgtatctcagtcaataatggctgtatcaaatgtacaatccactggatcaaaaaagaaaaaaaacaaaaagaagaataagaaaaataatcaaagttcacagaatattgcaaacgatgtggcatcgtctgaattaaatacaaggtcaaattctgagtctgtattatctaatctttctgatgaaaattctgaactgttaaaaaaacagtatcaaaatttgttaaaagattttgaagaatttaagggtaatcatgatgattgcaaagagtggaagtccaaattggaaactttgaaaaaggaggcaactacaaaacaagatactattcaaaaggaacttgatgaagcaaaaaatgctaatttaaatcttacagaagaattaaaatcccttaaagcacaattacaagctaaaaatattgaaattgaagaagttcgcgatatgttaagagaagtgggcaatgaattggttgatgcaagggaccaattaaaagaaacacacagtgagaataaggagactttgaaattacaagatgagattaagaaattaaaaaatgatattacattttttaagaaaaaagaaggtgatttactgaacactatcacttctttgaataaagatatttctgaaaccaaaaaattacaaatgaaagaaaaaaatgactcacagcaagagatttcttctttaaaagtaaaacttgcagatttacaaaacgaaaataaaattttgaatacccagtctaaggagcttacagtccttaaaacaaatcttcagcagaaagaaaaaacaatcatttatctcgaaaagcaagtgaaagattttattactactcaagagaccattaaaaagaatgttgatatattaaaaagggataatttacaattgtcaaataaaaacgaattgcttaaaagggaaaatgaatctttaaataatgatattaagaataatagtcattcctatgaagaacatcttaaagaaaatgggaaattatcagaaagattgtccattttacaagaaaagtatgacacactacaagatattaaaagtaattccaacgaacagattaactctattagaagacaatgtgaggaattgaatgttaaattaaaggaatctaagaaaaaaattatatcattggaaaatgagttaaatgaatatacaacacttatccaagataaaactaaagaatcagatacaatgagaagacttttatctgacttgcaaaatgaagacaacgaaaggcatcaaaatttagaaacgaaaatttctatattgtccgatgagaaatctagattggagtcacaattagcattgcaatattcaaagcatactagggaacaacaggagttgagacatagtaataacgacttgcaaactgcaaatcaacagttgaatcataaagtaaaacaacttaatttacaaattgaacagcttaaggagacaaccaatgctatacaaaagactacaatacataatacagagagctcagcagatcttgagaaaatgataactaatcttaaaacaacattgtctaaggcggatactagaatccatgatttacaaaatgttaataaccaattattagagaccaataatagtatcaataagaagtttgataagttgacacgatcttataaattgttatcctcacaatataattctctaaaggatggtaaagtggaattgaatggtagaataagtagatcagattcagttaattctcaactttcaacattaactactcctattagggagagatcatctagtaacctatcgaaagtttcaactaatagagaatttgtatctgatttaacaagacaaaatgaaacagaggctgagaaaaatgaaaaaatagcatatattaaaaatgtattgttaggttttctcgaacataaagagcagaggaatcaattacttccagttgtctctatgctattacaattggatagcagtgatgaaaaaagacttttagcatctatcaattaggtcatttttataatataaaaaatagatatatatattatgttctaatacattgttcattacattttttgaatgttggctgatatataaagagagaagaagaaagtagaataaggtaacaaatctggcagatatatagaggggaaatatgaaagacattttttaagcatctgggttaaataaaatagaataatgtatatgtactttttaatcgataggaaatattctgatataatcaattcctcctgcgcattcagcaacagttaattgatcttcacctatgatcctgttaacgtttattcccacatcaactgttttatcgacaccatcgtgttccaatagcaaacctgtaccaatcttagtccattcttccacatcacgatatatttgttcttctgatttgataggacggttcgagattaaactccaatcaaaggaatcacggtcccatagaactgcttgcaaaccaaactgtcttattatggctctaactctatcatcaattccaccatatggtggtctaaaccatttaggataatgaccacccgtagcattcattgcccatattgaccactggatttgtgcaataatttcttcattagttagacttggtaaaaacttgtgtgaccagctgtgggttccaatcagatggtcatttttcattaactgacggtaaatacctggattgtttacggtattaattccaaggacaaaaaatgttgacctatgttttaatgaatcaatcaatttaatggaagctctggatggaccatcatcaaatgtctgagataatttactgcatgtaccgatatcatctgatctcaaacaaacgtggcaatcaaaggaacaggagtctctaggaactctcaaacagtgaccttgcctatatggactataattaggaaccttttttaaatcaataaaagaaagcggaatataaggtggatccagtcctggccattgggtcataccagtaaagtcagttaaccattgaggaaatggtgtttgactcaatctatctccagttagtgcaacacctccaagcatagggctttgtgcttctatttgtactggattagctaccgctttattaaagcaaaaatactctaataaagtaaatatgatataagacgttttcattatgttcttgggtgattgtttcctatggatgatataatatactaatgataattttttatatcatttgttgatattggctatttcaccaaggcacctatttatatcaatattttttgtataggtttgattcatgaatttatggaatatcaattaaatgatttgcctttatttattgctattttttacttttaccaatttaattttttcttttttgaccttcttacgtaaatatattattatacccttaaccttctctacttcctaatttctacatgtattcaattcaaattaatagtcttgtaaatattagatgatagattattatgtttaacaaatagaataatagatattgattaatgcaaaaaggaaaagaaacaaaaaatatgtccttggagcagttataagaattggaaacatgcatgtatgttcaaaggcgaactatatgagctgttgataggctcaaatgcaatagcaagaaagagtaaccctattatttagaacaaacccttaaaataatttcaatattgatcataacacactttgtttattttctattatcctttgtattagttaaaaaaggtagattagaagagactcgaaaatgctcgaacaaaaataaaaagcaatagattattaaatgaaattaatgttgattttttattttacattcaattgctttttcagcttttttagtacatactgtatagtttgggtaaatgactaactttgatcccaattatttttaatgaataccatgtaagaaatattctgattaatactaatgactcaaatttgcaattataatatcctgtttcaatatatttgtgtcttaagttatatggctacttattattattttaaatagataaaacacagtcatatttaatgttgttaagtgctgaccctgccattgttaaccttacagtttcgtagaaattaattttgtcatcgcttaatagttgtgcagcttctttatttagtgggtctaatggatttggttccaaaaatagaaatagcaaaccaataacaattgtttgcagatcaagggcaggtgtccaatcttctctcaaaatatttaaacaaattttgccgtcagtactaatattgggatggaaaattttatttaaacataaaagtttaggtggatcaattgggtagttttcgttaatggttaaactaaatttgaagctaccaccaaaataataaccatcgtctggagagatggttatatgaattaatggtggatgattttgagtatcttccggtgagtttattatttgtacactgaccgtagggggtaaaactaaatccttgatatctcttgcaagtctaactcgagcaggagataattttgaggaaacagtagaactgttacgagattcttctctctgcttcaattcattatgtttcttttgttgtagttgacgtaattttaactaaatagagaatcaagtaaactattaatgactctttatgataaagatctagggataacatccattgcaaattagttagtaagagaaagagatacaagttctaacaacgtattacaacacaataagagaaatggtccttctaaaagacgattaactttcttattttttttttccttttacttctgatttgagttgtcttaaggcttaataatacataccataataacaaatctatacaatattctatggatatcaaaaggaacagtagtctttttaactcgtaggaaggattaaagttgttcaatgtcctttggtttattattaactattagtttactctcttgataatcaatattgactagccaacttttacaaaattagttgcaataatattagtaggtccttataaagaggcatagataaatagtcaaagagtttgttcctgttatagttaacgtgtgctttttcgtgatgtggagtaagcatatgttcctacatatctacgtgtacatatttattttattttatttggaattgttgtgtctataacgtgttttcgaactgaacagaaaaaagtatgagggagaaaagaaaaaaaataaaagagaatagaaaatgttgcgctaccaagctttctttgtggagctgtaaacaatatatatttagggtgataggagcaactcttatcgaatagatagggtgttacaagaagaatagctctattattgattaagtaagataagtctaagtgaggggtcagttagccttttttgtagttactcatgaggcttggtactaatagaaaattgtctattagagcaaaggctttacaaaagttgactcaatactacgtcgagaaggatagtaaagaagatgtttcaaataataattgtccagaaagtcttaaggttttaatccaatcccttcctatatcctactcaactgatcctgctaaattgtacactattcctcttacttcaagtgaatgggaaattcttttggccattagttccgcaattcctaaaagagttgaaactgctaaatatatcctatcaactgtaattaaaaattattttctagattcacctatacaaagaatttcagacgttttatatgccagatttaagttgaattcctggaagaatccaaatgaagtattaacattccacctaaccagatatttggttcagatatgtaacaagttccctgaactggttcctgaatgttcccaaatgattgagaaatatatctcaaaagttaaaaaatttattttattaaaacaaacagccatattttctttgcttggatttatgtcgtgctttattgataattattcatctattgaattgattagttttgtttgggataaaatctataatcaattttttgacaataattatattaatcaggttgacaaattgttaattactccaaattcttttactaatgaagcaattgtacaatatttcgattctggtaaagaaatttctggtccattgttttggaatttattaatgaaaatacagcagaattatctccaacatgtgttggacatgtcatttgatgataaaaaacaaaatcttggtgagtttatactttcccaacaatatgaaatttataagcatcaagatcaaaagattgttaaatctgtttcaaaaggtaagtgtgattcagaaactttttctttagattctaaaactacaaaatttttacagtccttgaatgagaataaagatacgcttatctctatgtgtcatcgtgtgcttgatttatggagtatggtggagaaaaatcttgatttttctactgcagacagagtaaaaaacagttttgatatattagcaggatatttgaacattctttgtttgtctccattattaagtgatcataattttaaactggagattgattttgtgagaattgtggaaaattcaatggatcaatatttattatctgatataattacagacaatttgataaaggctattattaatgctggttctttgttaaactactacacagaagatttatctgaaaaacttctttgtaatttcccattagtaattgggtcccaatatattactcaacaactggtaattgacatttctaaaattttttccattggattgcaacctttaaatgaggacgccattgttacaacaatctatgcaattaacaatttgttaactctatcagaagatttatctcctcaatttttgagggatcgtcaacagacattaacttcaattagttcaattccaaaggttgatggcaattccctattacatagttcaacgtcgttaagaaaagttactagtacctctagtctttcaaaaatgaaattatcgaaaaaagcaaacagtacagctactgttcatactaatttgtttaacaattgtgttaccaccaccataactattgcttctgagtacaataatcaagctattactgctttaacaatttctattttaacacaaaaggtgacagtagtttctaaagaattagctggtattattttctctgctttagctaaattagcaccttatgttcagaaagcagaattttcagctattcttaggtttttcaggattacaattaacatggcttataagtctaatgatactgaattaattgatgcagtttttaaagctcgtgttatattgtccaaaaggctcttggaaatgaaatatagtacggaaatctacaaactttatcttctggatctattagattccataatttctagtggtgaagttgaaaattcagagcatcacagatctcattcagagatatcctacgttgctaatcaaatagcattacagttggtgccactagcttcaatgttaccaaaatgtggtgaaacaccacttaatatatcacacgatgaaatacttacaaataaatttagaaatatgtggtttaatatggttgttcacggttattattatgattctgatattgttaaacaaaattataaacatttaaaggttattgcctataatagccccccattggcatctgagtttcctattaataataaagagatgtcactagatatgaatacaatccttcgtcgtaaatcatctacttctaatttgaaaaaacaaaagcaggttgtgttggaatatttaaacgtcaacgcagttcaatctagatcaatatccgattcaaaggtcatgtttattgcagctacagtgttgattgaatctattaggtgtgaaactggtgtctgttcgaaaattgtttattatttatctgacccatgtttagtttctagttctcttggaaagtcaattgcattaatatcgaaaacaattattttcaagtatgctaaattagcacaagcattaataacaccagagtttaattctaaggcgattgctgaacaactgactgaaatgtttctttaccttattcatagaaatcataagttgcaagagatggcatttacatgctgtaatttgcttattcaaaatataccatcagctctgtgtcaccatgattctttgtatacattactggatttaatgactactgtttttgatagtattttagattgtgagagaaatagattccagcctcattttgaatttactttaaagcactctgctactaaggttttatttcctgcgtcaaaaaattggagagttgcaacattaaaaaaattgcataatgcttcaaaagaatgggttaaattaattttgaataaagctaatcaagattcaaaaattttacttcagtcatacgtctctaatattcagcaatttgttagattaaataacgttgagtttggtgtttcttttgctctggatatggcgggcacgattcttgatgttgacagggaattaagtacaatcgaatattcaggacctaagaagcctaatacaatttctggtttcatatctcaacattcatggagatcgcgatacttagccaactcttctaccactttatcaaaagaagattttgacaagaagttgaagatggtgattcaaaatattaatgaaactttagagaaaggtgatgttgtttcagatcaaatggtatctgaatttttggatatggctgcggctaatttagttttggatagctatgatatctcttctttggttcatgacgttgtctttataccattcgaagtatttacatctaccaccatgaagatagcgacaaatgtttggcttgctattattaaagaaagaccagatttggcacatgtcttactagcgaatgtttgttatttttggatgttaggtgttgattcccaaaagggtcttttttctagaagttatgatttgcagaccgaagaatatcaaatgatggaatatgcaccatataataaaagggcaattgatcgtgatgctaaattagcatcaaaagctcttcaacctcatagacatataataaagttttttacctcacatttcgaaagtactatccttcaaagcaagttccttctacaaatgtttacaagcttaattattcatggtcttgaacatgttacaatgggtagttcacatccatttgcaagattgattcgttttgaattattgcaattatctctgtctgttttagaacaaaacattaagcaaaagaataaggatgtggagaagttgtgctgtttaattgtgaattcggctttaagctggtttttggttccgccatcatggccttttggttccaatgatatgaaaattaaggcggacttagctgtacttcagaatttttaccgtcgtttggtaaacaattcttctattttcaagcagtattgtgatgaagatattttattattacaatatttcttggctagtgaaattcaacaaattcaaacatggttattacctttagagaaaattaagggtgctaactctaaccatctaactgattcgatcatattatgtgcttttaagaaagatccacaactagcctggaatttggtacaaagatataaaggaaataaagggtcggaatatctaagttcattagtgaaaaaatgtcaattaaagtgtgtgagggtaccgcaattagcatcagtatttgctaagcaagttagaactataaaatcagatgctcattatataatttattggtctccaacaagtcctcttaagtctgtaggattgtttttctctgagtatagttcaaattcttatattttgcagtacagtgtttattcattagaatcacatgatgttaatgttactttcttttatgttccccaaatagtacaaatgttgaggtatgatcggacaggctacgtggaaaaattgattattgacacagctaaaataagtgttttatttgcacatcagattatttggaatctgttggcaaattgttataaagatgatgagggtactattgaggatccaattaagccaactttagatcaagttcgtgaaagaatgattaaaagttttagtaattcacatttggaattttacaatagggaatttgaattcttcaatgaggtaacgagtatttcaggtaaattgaagccatacattaaaaagagtaaggctgagaagaagcaaaagattgatgaagaaatgagtaaaattaaagtgttaccagatgtgtatttaccatcaaatccagatggtgttgttgtggatatcaatagaactagcggtaaaccattacaatcacatgcaaaggcgccatttatggcaacatttaagataaagaaaaatgtgaaggatgcagatactggtgaagtactttctgttgaaaaatggcaagcggcaatatttaaagttggtgatgattgtagacaagatgtgttagctttacaattgatctcaatcttcaagactatttggagtaatattggtctagatgtctatgttttcccatatcgtgtgacagctacagctccaggttgtggtgttattgatgtcttacctaactcgatctctcgtgatatgttaggtagagaagcagttaatggtctatatgaatatttcattactaagtttggacctgaagatagtattgattttcaaaatgctagaaacaattttgttaaatcattggcaggatatagtatcatttcatacttattacaatttaaggatagacataatggtaatattatgtatgatgatcaaggtcattgtttacatattgattttggctttatttttgatattgttcctggtggtgttaaatttgaggcggttccatttaagttgacaaaagaaatggttaaagttatgggaggttcaagtgaaacatctgcgttccaagaattcgaggagttgtgtataaagggctatttagctgctagatcacatatgaattttattatagatgggattgttccgatgttagacagtgggttaccatgttttaaaggtgataagacgattaggaatataagatcaagatttcaacctgagaagacagaccatgaggcagcattatttatgaaggcattgattaaaaagagttttgaaagtatatttactgttggatatgatgaatttcaaagaatcacaaatggtattccctattgatacgtgttataaatatatgaaaaacaagagtgatttatcatgtgtatttatatatatttatatgtttattatgacgttatatatttattatttctcttatgcctatttttctttgatatgatataatgtataagattaaaagttatgtctattacatatatgtatatatatatatggtacttgtatggatgcagatacatatggaaaggagagcaacaagaaaagcaaaacaataactactatatgtggagaaaatgtagtggaatatatatatattattttgtatttttataaggtattattgtcctgtttatttcttttttctgtattcatatctatcattttataatttattctggcttaataccattaaaagtcttttcaaaggcttgttcgaaatcagcgataatatcatcaataaattcggtaccaacagaacatctgattaaatctttggtaacaccagaggccaatttagcctcatcatctaattgttcgtgggtagtgaaatatggagcaatgactaaagttttactgtcaccaacattggctaaattggaggccaatttcaaatggtcgacaaagacggcacctgacaatttgaatggatcagtctctttatcggcatttggaagatctttgacaccaaatgaaagtacaccaccgaacccattagataaatactttttagcgttttcatgatgagaatgtgattcaagaccaggataagagacccaggcgacgtatggagatttttctaaccatttggccaatgcaagggcgttttgaccatgtctttctgcacgtaaagataaagtttcgataccttgtaataaaaggaaggaagcaaaggggctcattaaaggaccaaaatctcttaataactcgactctgacatgaataatgtatgcaaggttaccgtaggcctcattgaagatagtaccgtggtagccttcagatggagtagagaattgtgggaacttttcaggataatccttccatgggaatttaccagaatcgataatcaaaccaccaagggtagtaccatgaccaccgatccatttggtggctgaatgtgtgacaatgtctgcaccatatttgattggttgacagaagaagccaccggcaccaaatgtgttgtcaacgactactgggataccatgtttgtgagcaacttcgacgatcttttcaaaatcagggacgttgtactttggattaccaatactctctaagtagacacacttggttcttttatcaaatagcttttcaaaatcttcgggattatcaccatggacgaatctggtttcgatacctaaccttttgaaggatacagcaaattggttataagtaccaccgtataagtacgaggtggagacgatgttgtcaccagcatgggctagaccttgaattgcaagggtttgggcagcctgaccagaggcgacggcgagagcagcagcaccaccttccaatgcagcgattctattttctagtactgcggaagttgggttttggaaacgggaataaacgtaacccgggactttcaaaccgaataggcctgcaccgtgttcggaatccttaaagacataggatgttgtagcgtagattggaacggcccttggtctgaaagcgtgatcagatggatcttcttggccggcatgcaattgaatggtatcaaaatgagatggcatgttgttgactatttgtttgtttgtttttttactacggtgttggatgactttctgtttgatgttctgggttatgtattattattacataagaaaggtagtaactgttatacataatcaggctgaaagaaaatagaagaaatcaaaatcgggttagaaatttgtagtctttttatatattaaatggaggtttcactttgattaaagtttaaaatcatatattaaaaagataaaaattcctcgagaggatgcaaataagaaagaatgaagaaactattagatattgtttgtggggtagtgcgttgagactttagtctaccttactgtactcattctccaataatagtatgttcacacatcctatttcacagaaacgaagactagactggctgcttttgttttagaactgtgtatacgaacaaacaaacaaatgaatcaacaagatggatgaataggtgaatcagcagggacggtgtgaaacgagggagaagaatcctttctatctctttctgtttctttctgcttgtctctgtttctctcttgctttcagtcagatttagtcattaagtcattatttccacccactaagtagaaaaatccgctgtcggttttcattgccctccctccgtgtatgattgtcaccacccctttttttggggaccattttaatttttttttttgatagcggtgtgatttacacagttttttgtaactcttttattcttttttttttttgcgctttcttgcactctttgactgtgggtcacatgattccacagtttgtctttattttcttagttgcggcgactttgcaaaaagaagtgtggcctcctccacagtttgtagaagatgtataggtgtacagtttgtcttcattgttttgccccctacatttgtttgtattcctttaagatattagaaggtaagactcgcaaaggaacggagtcactagtattgtgtctcacacgatttttaacataaaaagtattagttgtggtatgctttttaactactgcaaaagtgattactactcgtcacttacatattccttctaaacttataactgtgatactaatgttaagatcaaaccttattaagtgattccaatttgttgatttctagcttgttcccaaaataggtcgtatattagccaacatatgaacgaattgtatataaatagttgatatacaggatatatatatatatatatatatataggtatatattatttttttttctgtctgtctattaaagagttttcaccttcctcacactggcttctcaaaataaatattacattttctgaacttatacgccataagcaagcttatcttggacaataaataacgccttgcaagagattttataaaatttgtaatagataaaagatctactacgagagatgtactcttcttagaatgcaaaattagataaaatgattcttgcttattgtttatgtatgatgcataaattataacagtacaacaaacactgaactagtgtacatattgtgtagatatacatatatatatatgtgtgtgtgtttatatgcaagaaaaacaagaacgtcaactaatccttgattaaagagtttgcaaacttatttttcaagagacatcaggacagtatatgtcacaaaaacaagcgattgtaaaaaagataaaattgtaacatatgaaatcctgatgtcactataaatgatcttgtggacgccttggtcgacgacgacgcttttgtttttcttgtttatataactatgtttatctgtatatctgtatatattagtttactctttatgtagagtatagtctatatgtcatatatagacaacaaatcaagctatatctatctattttagcgtctagaagagtgtatttccttgcaatagggttttcatctattacaaaaattacacaacaccgcctttgtatcgcgaaatgttgcactcgtacaatgaatgcaaaaaatgagagctgtgggattcgaacccgcgcatccgaagatatcagaatactaggccttagaaaccttaatctgacgccttaaaccactcggccaaactcccatttccttggtatcgtaccctaggaatgttgtataatgaagaagttattaccatcaagattatataagattccaaatgaatccagaactatttactgttttaataagccatacacgtgctacaacattagatgctgtataataaaaagattagttccattaagattacataagattttggcaaatctagaatttacctattgttttaataagtcccacgtgtattactaattaccatgattagagaattggggtgcagtttctaattcactagtgttcctgaattaatgtaacaaattttagggtgaatcagtcaagtcattaatgtactaatctgaataatcgatcgagctccagaaaatacataaaaggacaacgttttctggagataaaagatcatcatccataactttttttgtaaataatttatatattatatataaacagaaatagaacaacaagcaagtaacaaaataaataacttcaaataaatatattagctcgatataagccgctcaatatataaggccgttttagtaattatattatcgcctatagttgattactgtctcgattatttgaataactgttaatattatttgcgcttccctgaaatacacaaaagaatctgactattttatattacaacaagtaatgtagccttttctatactatattaattgtacaattgcattgtgtagatattacaagtaatcaaaagataagaataattattcttggaaaatgagagtttattactgacattttcataagaattatttttaattagttttttctatatattctgtggtgtacggatgtaccataatatatgggaaaccattttatttttcactaaatatatctttcagagatttgaaaagaaatgaaaaactttaaaagaaggtgtgaaatgaatgagtttacgctacattcaaaatacaagaaggatatgtacatatgtaagttaaaacaaggacaagcttttataacttgacaatgtttgccattaacatggacgccaagagcagtggtttttatatttaacgtcgtcatgagttaataaattagtaacttgaggctctggtttattaaaaatatacacaaataaaatctttaaatatacacgaattaattctttgttatttttatttatttttttctgaaacactcttcttcatgaaaatatttatattatcattatttatgatacaaaaaagtctttaataagaccaatgaacatattttctattttcaaagatttatctaaagttattctgtataatatggaaaacacatatattattatgcaccatgccaataattcctgactattggtagtatgttgcttttcgtgatttaattacatcattattactattgttagctacattattaacggagcgctctatatattgtatgaagataataaaaagaatgtattgtaatagctaaagaaaacaatggttgagaataatcagtatatattcggcattcattaataataagtggacaaaaagaaaaaaaaaacaatatcttttttcaggttgatcatcaaatcttattattttctctggctaatctctgcttccacatgtataaaatcattagccaagccattaaaagcatgcttaaaccaacacttatattacaagtgaatagagaggtgaaacctctatattccattgcttcaataacttgatccgtggattccataaatataaccccaccacaaattaaacaaaatgaggtaattaattcagttataggtcttattggtttttgattatttgttggtttcagataacatattaagtaagttagaagtctgaaaaatgaaccataagagaataacagtccccactgtgtatgtacttttgttgaaaggtttgaggcttgcgcatgctgtgacattaagacacctgtccaaaaaattgttaatgtggggaatggatttggagaatatcctgggctggcagcaacaatttcattttcttccccaacttctatttggttcttgaacaactctttgtgtttttcaaatctccatttatttaattgtatttctatcaatacaccacatagtccagtaccaatatacataaatgcaatggacacgtgttgcaaatctttggctgtccaaggtccaccggcacctgccaggtgttctaaaaacacatttgtacttccatatagtaagattaatccagattcaatgccttccattgtgatagtacctcttggaaagagaatgttaggtgctgatccatcggaaataagttgttttttagtgaaaattattgggttccaagcccaaccatattcctgaccaataccacaatacctacctaatgaaacaattccaaggataacaaaaacaccacctttaatccaatgtgctagtagattaaaaattcttttttctttcccaaaaagattcccaatggccagtccaatacaaaagtctgcagtcataaatagcaataggagcaaattgaaaaaattcacaaaataatacataattttgattccaatcgaagaattatcgttgtcaaaagtgtgttttgatagatttgagttagttccatgacgtaggtcagtagatccattattgggtggtgttaatgattcgatatcatgctccacgaaatcatcaaagctatgatcattatccttatgggtagttagagcagttgtattcaaatgtaaatcatctaacgcaatatattcatttttgagattagaaatgattagattagatcttgtaagtacgaaagaaaagatataatggatagtaacgcaaataaataataaagtgaaaactttaaaataaatgttatgtggataccaaatatctgaattggggaaagtggctacatatacagataaagatataaatgatattataaacaaaagttgatttaaagttaaaaacgaaatatagtatttcacattatttttattattattattatacactaggcatattgggtatattaataaaaggcataacattaatgtagatacatggcattgtaaagccttaggttttcctaaatcagttgtgaaaaaagtggtagtgttataattttcccaatagagtctttcagcaggagtcaaactaggtctttgtaagattggtaaaccgtgtagatgtttaggtgcaaagggaattggtgtaatatttgctaaatcagtagtaacagcagcctgaagagctgtttccgtatccatgttcatgtccatgtccgtattcacattcatattcattcttgatagctgataattattgttgtcactgtatcaatcttatattccctctattgacattttatatcaattgagagaaactatcctaaaatcttcttctcaatgcaataagatatagaaattgaagtcactttaaaccaaaccaaaaagaaaagaaaagaaaaagaaaagaaaaaaaggggggaagggaagaaaaaaggtttcaaagcaacatttcgacctagcaataatcagccttctccattccctctctcttccttcatctctttcatgtatctttaagttcttttggttacatttgtggaaacaatctcatataagctaaaagagtccgtcaatggtaacatagaaagggaacttgaaagcttgtattatattaaactttttctctttgtttgactgacatctttttatggtcaatgactatttcttttggaccttgcattaaaagtgacacaatttcgatttcaaagtcgtctgatccttaacaaaaagggcaaactttgtctggtaaacagttttgaaataaccctaatttgtttgcaaaccccacagtgaaaaattcagtttttatttgaaaaatatggctgctatggcagacccttaacaaaaaacgaaaaacaaaaaaaagaataaaaacgaaaccgaaaacagataattggggaagaagtatagaaattgttaatttagcggttctgataatagagctgaataaataataatgggacaaatcgcatattataaagtgtatacaaagtaagtactaccacccttaaaaaggttcataactggtcattgttttttttgtttttgttaacaatcatttcttatatttgtagcaaaaacaagaaaatatttttcaccctattaggacagagctttgaacaaatagataatgtttttaactgaattttaaaggattttgtttaaaccctagtttaccagtaaaagaaaaaaagaaaaagaatatctcattggactatttgtttgggccaatgtttttccttaatattgagccaactacttgcaaactggaactctgaataaaattcaaagggtttggcaagtggtgaaattattcaattatcttttttttttttttcacggtggcaaaggaatattaattggtcatagatattatactttgtaaaggactatacatatatatatttcatgaaaccttaactatctgcaattcgaaaaattttttttcattttttactttactttaaggctttataagatatattagatgaaacattcactagagtttatggatccttgaatgttttttttcttgatagtaaaataagttaaaaatataataaatggacaatattgatacccataatcaagatcatttgcacaatgaaaaaaatatgtttattgattatcgaaaaaaatttcatcatacacgccaaagtttctagtaattttaaattacttgacgatcgtaattgacttgcaaggaattaaggtgatagaaatatagataatacatatatttatatatatatatatttagtgaaaagcgtacgttaaaatattgactttctgtttgagatctgatataaacttatttttttttacctatggatatatcatgcaaggatatcggtcaaattttaaaacctaaaagaaaaaaaaattaatttggtaagatttattaatttatctattttgctttaataatcactctgtatttcatttttatatattattctttatatataaaataaataagatatatcttcataaaaaaaaactaatatactattgaaatataaatatctaattttatctaatattgttaacttaaaaatgtttgttgttattaagtacgtaaatatctattttttatcaattagttgtaggaagattgtcgaaatcaaatgttctggaattaatagatagattaattagattttagcaagtatgaattgctaacaaaatgtggagaatgtatcgtttacatatcagtagatgtaaacaaaccttatcaacaatttggtaccatacgtaaatgagatgtaccagatatgaaaatatataaagccaatacttttttcatatcgtatttcttcccttgttcatctttcataaatcatcacctatatattatatataaataaaaagaaacaaaaaacttaatcatagatttgtactttacatatattaatataacattgagaatgtatgctacttatccaataactaaaggcgttaatttttaacagggctgatggaaaataatataaatattataatattttaaatgagttttttcactagcaaaaaatgtgtttattttttttaccttttttgttcattacgacattggagttgtaacaaaaaattcttattttctaaatttttggtaaaatcttttgaaaaataagaaaaatcataaaaaaaccatcaaaaaaaagaaaaaaaattacaaactctagatattttacaaaaataagagtgaaccaataacattttattcaaatcataactactataaactattactgttggaaaatgagagtttattactgtcattttcataagaattatttttaattagtttttctatatattatgtggtgtacagatgtacataatatcaggaaaacattttaattgtcaccaaatatgtctttcgaagatttgaaaagaaatgaaaaactttaaaagaaaacttaaagtaaataaaagaatgtatactgaatacactatataataaatatgtacatgtatttagtataaaaacaaaaacaagtatctataacttaatgatgtctatcattaccatggacgcagaaggctccaaattccaacattatttatatatggtggaatagccatagaaaatacattcctttttttttgaatcattatctaaaattctatttatctaacaacaacatatattcttgtaattagtataagttagtttattggcactatggccgagtggttaaggcgagagactcgaattgtgtggtttggtgatctcttgggctctgcccgcgctggttcaaatcctgctggtgtcgttatcttttttggaacaaaatttgcaattgtacgaaatagtaaataaaatacaaaagtttttttttttaacgttcttggagttaaacgattatcatgggaaaaaagaaaaaagaatatatttttataggggtttcgtatcactttacaatgcttttgctgagattctttatctgcgattagggcctgttgattcagaagaaataaagtagttgttgaaagggaccctcaatctttcagagcttcgtaataaaatatctatattatatattatatattatatactgtgagaaaagttggtgttcaacatcccccagcaataatctcatcacaaatgagctgattattggaatatttatcatggaaaaacttattcacaatcagtgttacctcgaaaatgcgtaattttgttgaggctagggttgaaaatcttttctgacttaaccaagtagagtaaacacaagaaaacattagggctttagtatttgtttcatatttatacagagtcgtatacatagataaagaaatatcaattgtcattattttactgtgacataagccatattatacacctgtatatctgaaacactacatttggagagcatctgaaagtgttaggcacatatttcaatttaattagattgttgaatcgatcatcttgatatgccgagagtgtaatataacaaaattatgtatatggaattaaaacggaaatcaacaaaatttactcgtttataactttctttgatcacttcgttaaatattattgattaacatcctatcattctatgaactatacatttaaagtataatcaaaatggaggaaaactcaattaacttgcacttgaatttaaccaactttgtttttatttatggttataaaacttaacattggaaataaaaaaagaaaaaagatttataagaacaaagaagaatcaaaccttagtgttactgtccatgttgaatgctacccaaaatttgtatttcttcacaaggtgagtttgtcgatgagaatggtaatttagtacagttgcgaggagtcaattttgaccctacagtaaaatttccctctaatccaaactatccgacttatttacctataaattttaaccaacagaatcaagaatcagtcagtttcatcaatcatcctgttcctattacagaagttaaacctcatatctttcgcctaaaatcgttaggattcaactgtcttagggtccccttcacttgggaatctatggaacatgacggtcccggaaaatacgattttgaatatatggattacttaattactttgcttaagactattcacatgatcgacaatggaatgtacatatatttggatccacaccaagatgtatggtctagattcactggtggctcgggggcaccactctggacgctttatgctgcagggtttcaaccaaacaggttttacgatacatctgctgtactgttacatagtgattatgcaagagagtctaatgacagtaaaaaaattttgcccatgttatggactaccaattattacaggttagcatgtcagacaatgtttacattgttttttggtggtaaaacattcgcacctaaatgcgttattaatggggtcaatattcaagattatttgcaagataaatttattgacactgttataacgttttattctcgctgtcttgaaacagcaccttgtttattcacggataattgtattattggattggaatcaatgaatgaacccaatagcggatacattggcatggagaatcttggaaaactttcttcagatagacacttaaaattgggaaccacacctactgcactgcaaagctttttactaggagaaggtgttgattgtgcagttgaatactacagattgaaactgttaggaccaatgaagcaaggcaccaagcaaatcaagactaataaatcgaaatgttggttaactgaagaggagcggaatgaagttgatattaagtacaaatggaaacgaggtgaagaatggttaccatatcaatgtgtatggaaactacatgatgtttggacaagtaatggccatttattaaaaccaaattattttcatattaatccaatagacaattccattatcgatgaaagaacatttataaaccaatatttcatggattattatgccaaattatataaaaaatttagatcgattgataatgaccgttttatttttatacaaccgccagtcttgaaagaaccaccaaatattttgggctcaaaatattctgaactaattgatgataaaactgtttatgcatgccattattatgatggatactctttaatgtttaaaacttggaataaatattttaatgtgaatacatacgctataatgaggggcaaacctgcctgtttcaatatattgataggtgaacaaaatattcggaactcatttaagaatcaattaaaatcgatgagacaagaagtggcaactaatattggatacaatgtaccggtcatattcagtgaaattggtataccatttgatatggataataaaaaatcatattttattcaagatccaactaattgttataattcacagacaaaggccatggatgccataatgtatgcccttgaaagtaataatctgtcatttaacttatggtgttattgtcatgttaacacacatgaatacggagatcattggaatcaagaagacttctcaatatggtgtaaagatgatataagtttgaatcgaaacatggtttcaaaggtacagtatcctatgactcttaagagtgatattataaaattagatgacagcacaaatgaatggattgaaaagttaggatactgttgccattcggtcgagcgcatcaatcttgatgggatacggcctttatcatctttgttaagaccattcccattgagaataaatgggaattttgttgcagccaagtttaaccgtgaatcaaaagaatattctttaaatttaaaatgtagtgataaacaaaagaaggaccaagaatgtgcattttttgcaacatacatttttttgcctcaatatcattttccagttgctaaaatatccattgaaactagctcaggttcactcatatattatgccaaatatcaaatattaaaatggcaccatgagatcatgggagaccaatatataaagataaaacctcaaaaatagatagatataatacttcaaacactcgcaatggtgaaatatttttcttttttttttcatttcttttctttacttttgtttataatattacagatgcattgttctataacaaatcatacataactatactacattacatatatatgtagaaaaaaaattgtgaatatttattcattgtttttttttttattttattctgatttaatttcttctgaatctaacttcctcttcttattaaattcattattaaattgagttacatgattttggaagtaatcaatgaaaggttgtaaagattttggcggttgaccattggaattattaaattcttcctgaatggtgaccaattttggtgctttatcaggagtaaaactgctggaattaataggaacacaaatgttccctgtagctggatgtacacaaaatggtgcttttaaaagatggatcagttgccttgtgacttcaatatctaattttgggtataaaatcaacataacaatatcttctttccattgtttcagtctaaacataaattccttacgtctttgattattattaaatttcaaattagaagcaaaatcatctatatcattccatttatcaagactagatctattaggttgttcattcatccaaaactttgtcagggcgtcgaccaaaatcttgtcacctatattgggtaaaagagtccttattgcgttattattatctctccagggatcttgttcaatcaaaataaaatccatgaagtaaggttttaacatatccaaagaacggctcaaatgtgggtggtagggtctttttagatttaatcttttcgataacgacctatccttaataacatttaagtagtctagaatatttctacgctgtatgtcagtaagacccattgcacgttgatcattacaccagcagtgagcaccacgcctaccagagaagacccacaaataatcatgaaacgcaaaatcttcagatagtgcaacattaataacatccatggctaaaatgataaacttccagcatttatgacatacctgagccccttggcaacaagtacggaaggaatcatagtcatccatatcgatatcaaacaccaattctttcctttgcggtaccaattcagatttcattagtatctccctatcctttggtggtttattatagattgcaccaatttcaaatctatctggattaaatttgcaaatcatttctttaaactctcttaaagtagagatagagttgtaacgtttataggcacctgaacgaaaagccatggcaaattctcttgttctgatacaattatcattttcggctccctcttgaccagattctataccaccattatcatcattaggatttttcctattcagccaggaaaacacagcaggaaaggggtaacaattttggtaataatgctccatatcagcggcactaggtagagacatgattgacaacttcaattgcaaacttttacaggagacagaaaagagtagcttgttgtttactttatctctactattacactggcgtgattctaggattgaaccaaccactaccaagtagtagaagttaccaccaaaacaccaatatccattgctcaactaccaactatgcatatcacttctaatgtatcattcttccccctcacaaaactatagaaaataatacagaaatgctcgagaaatcaagaaattctgcgggtgtctggatgcaacaatccgggtaatctgcataaaaaaacaaaactgtggcaaaacgggaaaaaaaaaaagaaaaaagaacttgttttttttttttttcttttttggaggcaagaaaacctttttttgtagtagaagaagaaaataaaacaagacagtttatgtcttgtagatggagtatttaatgaaactacactggacttcgcaatggaagaagaaggtcagaagggtcggtagctcgccggaagtattacaagagcaagataaagtcaagctttatactttattttgattaattgatcgattgtttatttatatttcagatatggatattttattgggtattaaagttaaggatagtgtaattttggccacctctaaagctgccacaagaggtatatcagtattgaaagcagatgatgacaagacaagggaattgactccacacactgtaatggggttcacaggggaagctggtgataccgtacaattcgcagaatatatccaagctaatatgaaactgtattctactagagaaaaccatgatctatctgttggttcgacggccagttttgtcagactggagttggctaagtctcttaggtcacgcaaacccttccaagtaaatgtcctaataggtggtgttgatatttctaaaactacaaatgataaaagtgaggaagttatagaacctcatttataccagattgactatttaggaacacaagtagaattaccatatgcagcacatggttatgcaggcttttatactttctcacttttggatcatcattatagaccagatatgactttagatgagggaataactctattaaaattgtgtatcaatgaattggaaaagagaatgccgatcgatttcaagggtgtgttcgttaaagtagtggataaagatggtataagacagttggacgatttctaaaagctatccatcaactgttattaaatatggttgcatctatctatatattatataatgttgtcgaataacgtaaatgcaatattatttaaccatatcttttgatagagtagtatattttcttttaaagaacggtgactagtcttgcatataatatttgcttctcttttcttcttgttcttcttactcttgttcttttatccatttcctttcaagagaagaagaaggttgactaatctccctctacataaaataacaaaacaaaacaaatcgaaatcaaataaaacaaaaaaaagacaaaatgaaaaaatcgaaaagaagaatatcatcatctcgacagatgacttttaaacaagaaagaaagaaatacatcaaaatacaccaattgtaacagccaaacacgtatacgtagaaatgtcatcaacatgctatgtaaggtgttcaggtcttcatctatcaaataataagttaagagaaaatctgtatcttttattcagtgaatatggagaggttatcaaaattacaatacaatctggtaaagatacattagcctgggttgcgatgtctgacgaacaagaagctcaattggcttcttattctttaaataacacccgattttttaaccaggtgttatctgtacaattaagtaataaaaatacaaaaaatatcatatagtttatatgtaaatatatgtatacatctgtgtgtgggtaaaagaaaaaaaaaagcacatgtcttttattattgttattgttgcatttatttattctttattatattcaataatcattagctcatatctctttcttatatctactattttattacctgcttatgaaaatgaagttatatataatgtatgacaatatatgacaaccatttatttagtgaataatgtaattacatcctcatcattgactttatgatttaaaccacatttttgtggagaatgttttgcagaagatccccataccaaagcgtacttaaatttatccttaaaatctctatggatagaatgacaaagatccccgaccgtagatccatttcttactaccaaaggatcatcaaatacaggtttttggccacgtttctttgtataaacacgagacagatttaattgataccaaatctcttcaacaacatcttgtattcctagatccatttcacacgacatcaccacagtgtttggctcagctgctagacgatctacttcctccaacgacaccgcatcgatcttattatacacatacaaacacttaatataatttctgtgttggtcattaatgatatcaataaaatcatctactgtacatgtggaatcacgtacaaggatttcacagttatgaatacgataatctcttaaaattgctttaattgtcatttcatctaatttacctggtaaaggcggagatacaaacgtaattttaatcccaccggtctctttcttcttaaaatagatgtttggcttctctttatttaatctaataccaactgcttctagttcatgttctaacgattcacgttgatgttcactctttgtggcgtcaaggatcattaatattaaatctgcagttcttgcagtagcaacaacttgcctaccacgacctttcccctgagatgcaccatatatgataccgggcaaatccacaatctgaatctcagcaccaccgtattttaagacaccaggaacagaggttaatgtagtgaaagcataatgtgcaatttcagattttgtagaagtgatcttaccaagtaatgaagatttaccaacggatggataacctatcaaaactacacgggcatcaccggacttggccacttcaaaaccttggcctccaccggatcccccactggcattggcctcatctgccaaaagttgctgtctataacgtgcaagtttcccctttaataaacctaaatgatgttcagtggctttattcttttgggttcttgccatttcctcttcgatggctttaatcttttcgataatacccattttgtatcgacttttttctcagttgtgctttatcctatctaatttaactctaatttatttacttggattagaatgttcataaatacttgtatatatctctacctatctatagatacagagatgaatgcgtatgagtttgttatatcagtgtgcgatgttcttcttcttgatcttcaatttttgaaagattttatttattcatttatttattttttaattttttttgttatttttttttttcctgtgcacaaatttcaaaatattgatttcaatgtctaaacagaagaaagtaatactactatttaatacatacttgtatatatgggtatacatttttatgtatctgtatctgctcatattaatacgtgcgaaaacaagtctccattgatttatgcatatagtttttccatttctgggagagagggttagaggtatatcaaagacagtaaaatagtactcaaagaataatgaactataataatggtaacccacagtttaacttccctcaggggtccatgaatatgaatactggaggatccacgttctttggtttcaacaaccacaacaatatggatattggtggcaataatcaatttacgaatggtggtatgatgggcattgctcctgatcccctaccccacgggttgcttaacgctttatcaacccgtggttatgcacatgaaccacctttattagaggaaattgggattaattttgaccatattataacaaagactaagatagtacttaacccattaggtgtaatgggttccaacggtatcatgtcacaagagatcttaaacgattcagatttcgcaggccccttaatcttctttatgtggttcggtctgtgtcttctattggcaggtaaagctcactttggttatatatatggtgtggcattgtttggtaccctatcgttgcattacttatctaaattgatgtcttctagtaacaataacagactgcaattcttcactacagcatccatcctaggctattgttttttaccactatgttttctaactttcttcgggatattctgtaaattgaacaacactatgggatatctactagccatgctctttgtcatttggagtacttggtcctcatctggtttcttaaactctctactacagttgcataacgccagagcattgattgcctatcctctggctatcttctatagtgtatttgccctaatggctatctttgtctaaatttagggcttgggaagaaagaagtagaaaaaagtctgttgtcatggtgacaatacaccatacatttagggttttctttctttcttccgtttttttcaattttctcaaaggcctcgagattcttgcaagggatttttccaatggatttattaaataccgaatgaaatatatgatatatacagtatatttattatgtgtgtaggtgaagagatataaggatatttttaaaaaaacaacaataataatatcgggttttggcatttgtattcattagcttggtctgtgacctgaataggtagtacatgcatgaatatttgatgttttttggtaagatatgtgtccttcaatttaccgacatataactactccaattttctatcctaatgcatctccacatttaggtcacttatattcttcattattggccgatgttcaacatagatggaaccaactacaactatataacagtaaattcacaacaggtacagacgaacatggtttgaagatacagcaagcagccatcaggaatggatatgctgatcctttgaaattcgtagatacattaacaccaaaatttaaaagtttagatgctcaatacgatatcaattatacgaattttatcaggaccacagatatcaaacatattaaaaatgttaaaaaattgtgggagaaatgtttccaaaacggccacatctataaagatattcatcaaggttggtattctgtctcagatgagactttttatcctgaatccaaaattatcaagctggagaatgatgataaggaggttaaatatgttaacaccgagacaaataatgaagtaacgtatcataaggagacaaactatttctttaaattatctgattttcaaaatcagttgattgacttacattcaagaaagggtctcaatgcgtggattttccctgaatcaaaaagactgtctttattgaatgagttgaaatccacaaacttatcagatttatctatctctagaccatcagaaaggttgtcttgggctatctcagtgccgaatgattctacacagagtatctatgtttggtttgatgcattaaccaactatatttcctctttaggaccactggagaatctatataacagtgacaataacaacaatactatgctaaaatattggtcccaaactacacacattattggcaaagatattatgaaattccattgttggtattggccaagctttcttctttctgctggactaccattaccaaaacgagttatcattcatgatcattggctctcacaaggtgtcaaaatgtccaaatctttaggtaacgtcattgacccaatggaattaccattacaatatggtaaagatatcattcgttggtcaatcttggaaaattcacaattaaatcatgataataattttaaaaatgaagatctatcaaagtgtagaaacatatttatctctaaatggggtaacctaattaatagatgttgtaatgcaaaatcgaaatttgatctatcaagagcagtcaataaaacgtatggcaatatttcaagtaaagatgattttcttaatatatggcaagaacaatccttatctcttgttgaaaatgaacaagtggattctattttcaatcaattagaatcattccaacaaacctactccgtaaagatggaaacattccaatacaatcatattataaaggatatttggaaacttattgatcaacttaatttatttattcaaactacaaaaccatggaacaagacaaatacaaatcaaagaagacaagatgcaataatatttttaactatggatatttctaggatcttatcaattttaacacaaccaataataccacaattatcaaataaatttttagacaggattgatgtttgtccagaaagaaggtcttttagggatgcgaaatttggtactgatcatacatatggcgctaatgctaatgatccatctaagaatgtaccaattgaaaggaaagtagcatcatacgagtattaattagctaagatgaataacgattatcgtgtgaataggtaacaataaaacaaaaagaggaaaagaaatgtccatttgtaaataatttggtgtttaaataattaagttacgaagatcttatttattctttttattttttgaattcaacaaacttttcattaactatcatcaattagtaacataagtaaaaaattcaaaagattgtattttaagaatgcatatatagattatataaaaatgcctatatttatgtataaattaaatagagaagatgctgtgctggaacttaaagtatactaacgtaaaatactaaaaaaaaaaaagaataataccattgataataaaatagaatgaactgtatctaataggagttaacaatttctacatcatcaagtcatctaatcatttgtaacattaatggtaggtgtacattgtatcgatgttgacgattgcatagtatcttgtgtttcattctctttaattgttacaatattattattcccataatcatttttaatcaacccagtcagagtattatattgccatgtggtaccatccaatctatgcacatcctcttctgtaatcgttatagagctttttattttgtctaattctaaagaatcggtaacttcttttcttttacgtttaatatctttgacgcctggtacatgaccgactgacattcctactttgactaaagtctcaatctgttctgtactattaacgattaaatcagaatcgaatcttatattatttttaggtattaacagaattatcgtagatccaccaaatttgaaatacccaagttcttctcctttcaaaataaagtcgccttctttacatgtcaatacaatagacccaaccatcatggcgcctactgctatcatgagaaattcaccaaacacttctgataccattggaataatggttctcacattttcaccaaatacatctaacgcactacgtatagctattggattaactgtatagtattctccacttatgtgaattggtttcccgatggtaacatcacaaggagcatgaaatctatggtaatcttgcggtgccaaccgaaaaatcgccaagctagtgttagaatcattatatctactgttattatagttatttgtcaacctttttagagtaaaacttgatgatttaatccaaatctctttggcactttcgatagatgagaacactgtaagcctcgaatctgcaggtgaagttatatattgaggagaatgactttcaatgactctacttccaggttttagtttcctgtaaaaaaattcattgaatgtactatatttcgtatcaagacattgtgacatgtccaaatgatggaatttaataaaggaatcaatttgttttacagatgccggattatcaaacttcctaccttgccttactgatagtgtttttagaagatatttaaagttcttggattctttacctttaccattataaatgattcttaatcccactttaacatgggcactaattttttcttcaacaatgatcccagtatctctgtcctgtactaaaatgtttgcattattggaacctaaagcatatttaccatatgataattttattaaaattttactaaaccaacgttttgatgcaaaagcagacgatatatatgtaggttttaacaattttttctgaccttcaaataaacaaagagcaaagtgaataaatatatcattttctgatgaaattttcaattttcgatcaatcttattattattatgactctttttaatcttaagacaattagggcattcccaaacagatctaaattcagacattttcttccaagtaaccaatccctgaatcaattcttcccttgttaactgatcacctgcccatgctgacttattaacatgatgaaaaaatgtaatagcatcattatcagtaaaggaaccgattctatctaaatataacattaattcaacaacatcaagttgatttttcaaaatgtcattatagactgaatattcccaaaactctcttttcaacatcaaatacgatgaatatttaatcttaatggtcagtattggattggattttacattttgatgatataaaaaatttaaaggtaaatttaattcaatccatccttttttttcatcaaaattattgccgtttttattttgattattcaagttggataaaatatcgatccatgatagattatattcagcaatctcgtcatgaaacgagattgaatctctatccatcactttaaaatggaaattaaatcgagtttcactaggaaatatttcgaatgctataaattcattaaaatatggatttaaagtgttatacttagatgatgtcttaaatacacgtctaccaaaagtaataataacaaatggatccatatcatagtttttccttgataatttattcttcaatacgggcaggtctattatattgacaatttccatgtatattacacccaaagaatgttttcttttaaagattttaaaatgattatttttactatagtttttgaaatgatccttattatgattatatttatatctggatctttttttcaaactcaataatttattttgattatttttttcgtatattaaaacattacttaggatagattcagtgtctgagttactagatatatctgaatcagttgcatagtctgaattagcattcttgatgtgagtaaggaatggttgcttagatatatttgttggatccactacatcatattcatctaaagcagtggctaaagattgtaaatctaaaatatggagagaatcttgaacttcttcttcttcttcttcttcttcctctccaccttcagagttatcttcgattttattagtagatccattatttgagatagcagaatctatttcgataaaagaagaggaagaagaagcagaggaaggagtgaggggatgagatacacataatgaggaagcagtagagcccagggaaataaaggaagataaggacgaagaagtagagtccacagaattaatagaagagatatccgaagaggtcaattgatctgaactatcattatcatcattataattattattattagaattttggtatttgaatgacaatttcttatttctataattatttaatctttgttcccataagataaaagcttttaaagtagtaaaatttcttttctgactacatgtaagtaagaaaccaagttgaatttcacctacaggaaaagcttttttcattgatttggaatctttatatactttctctcgctttttatcgtataatatataccatttaggttgatttaactgattaaaattgaactgattattgattgaggaatccctaaatatttcgttgattgaaatttgtgtttcacctatatatatgtgccgattattagtagatgtattagtagtaatattataattatcattcgcaaagattgagccgtggacagtcaatgtagatgaaagattgttattactattactcctgcttctactcctgcttctactgttaatattattacactttttattatgaatatgggtatccaccgatgaactggattgtgaagaggacaacagacatacagaagaagatgatgagggggatgccatcgatctagtcggggaaagatctcttttatattttaaatatttttgcttttcatgaataataatagtattattattattattattattattattatcaactctatcactatattctttataagcacctggtaataaatcgtatataacgatccttaacttgtcgtcatttggatatttaggtagatgtaatttaatcaattgattccaattggagttagaattttgtaacacgtttgtctttttaatcacatatttatttgttgagatataacatactggacaacaatctctgaaagtttggaatacttcgatattttttgtcctgagtacagaaacatgtaacaataacgttggaggcttatttgtagaattattttgttttttactactagttacagaattattttgtaacaatttcatctcaaactgtttagaaaatcctcactgtaattgtagcagttattgaaaaggggtaaagaaaacgaagaccaagaaatcaaaaaaaaaaaaaaaaagaattaaaaaaaagaacacattaaatagtagccagaatgattcaattagaaaaaaaaaataaaataaagatagtgaagaatcagacaaccatagagggttgtataattgttgtatagttctgtgtgcttgtagtagaagatatacctcaaggactaaagttgtctttaaatgtcgagcagtatacttatagtaaaatgtttatgataatgtatatatatatataaatcatattatattatatgtttgcatataatatatccatacaatagtttggcggctgtgttttcagtgcataaaaacgaaaaaaatcattaaaataagaaatattgtggctaaacacccaaacacctctaatgtaatgccgtgtgggtgcctgggtgatggtcagtttcctttctaaactccgcgaggttatcgggtatccgggtttatgacggttttccaaacccgcaatatattccgaagtggattgaattccggtctgcggaatatgagaaagacgggatgaacagagtaaatttctttttttttttgttttttcatcttttttgttttctttttgtaagaaaaaaaaatttactcacttaaactttgtactagcattatcactactataaaaataatgttctgtttaactagacgagcaatgtctgtgaaaaaatgaacacaatcctttaataacgctgtggtgcttcttgctctctttgttgtctgttatgtagttcacgtttaggatagttatgtgtatagttgtacttatatgtttcatacgtagctctccgcccctttagtatctatttgtttgcttgttctacaagggacttgatattcttactttcttttttttttttaattgaattccctgatatacaaagtaggatcgagtggatgattaaaataaaaagtgtatatagtatttaaaagggcattgaaatatattggggatattttaaagtatgggtaaaacatttagagaatctgcatctaaaaaggctgcagggttagccaaaaagagagagaatgctgctaaaaaggaaagagaagctgctgagagagcagaggctgaagaagctgctaaatgggaacaaggtgcaaaacaaaagactgcgagacaaatacaagaagaagaacgtagattagaaaaaatgagacaaaagaaaattaaagaacagttgattgctgaagaagaagctgaactgtcaaaaaatactaaagctggtaaagttaaaaatagaagaagaaaatgaaattatctctatcgttttcattagagtaatagttatacttaaacgaataaatcggtgaaagattcttatatgcatattatattagcttctacgtactaagtatacatagtagatgtctgttttttgcttacttatttatttacttatttattgaattaatgattaatatatatttatttcacaattatttttttttttatctttgtcttaagtcccctctccccatctatattatgctattcatacaacaggtttgaaacaaaacttattatataataattggttattctatgtacatacaaatatgcatatcgtactattataattccattcaagtggctattattagcattaataccaaaaaggatggtatctatacgtataaaaaatggcttcagatatgtaacaccatattatcataagaataggatttttgttaaaggtagatgggtagggaaaccgttattagatgtcttagttaaagaatttaggtcctttgataaagattattatactagagcaatcttcaatagcaaatataaattgtatagagatggtattgaattgcctttattttccaccacttcacccccctcttcaaatctgattataaataataatataatcattcgttccggcgatatcttagagaccataatacataagcatgaaccacccatcaaatattggttagatgtatcaaaagatcaatgcatcattgaaaatgatcgttttatagatgggattcccgttgtatttgaggataatgatttgattgtggtagataaaccatgtggtatccctgtacatccgacaggtggatattattataatactttaactggagtgattaaacatagtttaacaccatatactactaataataatagcagtatagaaatagatacaaatctgtatccctgtcatagattagataaagttacatctggtgtgacaatattagccaaaaataagcaaatggccaatatcattcaaacaggtattcagtctcatgatatgcaaaaattgtatttagctagagtccatggtaaattcccagggtctgtagtcattaataataataatagtagtagtagtaataataataatattagtaataataagcaaattttatcaccaattgacccattaaatattgatctagactcaaattgtttaattaaatgtgaatcccccatttacactgtccaaacaaaaaaacagttcccaaacggattgggtccatcgcgtccagcagagacaataatatatccatattggtatgatatggctacaaatcaaagtgtagtaatatgtaaacccttgacaggcagaacccatcagattagaatccatctttttaggttaggttatcctatagtaaatgatacgttgtactgttcgcaagtaacaaaataccctctgtatttagatttcatcagaaaatatgaagcatgggaagagtgtctcaatagagaccaattggctgctgattttgatcagctaattaaagaagcaactgatgttagacaaagtagattagtatccttaaggaagaacgatagaggtttaacctgtgataaatgtgaattgcctttaatggaagatcccgaagattttactgatatggttctatatttacacgcatggaaatattatcaaatagattcttcgagcttcaacgataaatatggcagttttgagacaaggctgccattctgggctgttgccagtcaataattaataaaaagagatttctatgccctcctttttatttcaaaactatacatacatatgtgtatatacgtatatatgtggctatgtatatgtatcaggtagaacataaacagttctaattggaggtcagagattaatttggatattcaagcaatttatgcaccaggaacatttgccttacctttcaatctttgtaaaatttctttaaacttacttctgtctctaccatttacaacagccgcatcgtcttcgttaatcaactgcaatgcacgatcccatgttgtagtgccttcttgttgaaagaattggtctcttttggccaagaattcctttgcagcagtttgtgtggctttaataccttcttgtttctttttattataattttcataaaactgatctatataagtgattgcttcattttgtaaatcatttttctcctttaattctctttcatctctctcagaaatttcagacccacgagttaatttccattcagcaataattttttcagcattttcgttaacttttgaattggtttcatccgagttgggtagcgtattgtcctttattaaattatcatgattatttggttcctgaatcacagatgcttcattagcagtagtgtcattgtttatgttgtcattattagaagtaaattcatcaaattcctcttccccttcttcttcttcttcttcccgattattattgatgctatcacttaatagatcagcatcttgttcagtcttaaattcatcgccaaggacttcagcttctctttttaagaagtcagtttcgtcatgagtgtctactggagtagtcgattggttttgtatatcttcatttgggtctaaagcaggaaatctgtcagccattgtttatctatatcaataaatatttgaaagacgaaggtgctattactgttgttgttattgttgttgtatcaatttgatatgtttctccttttccttttttcccttctttgaataaccttggtcaatatcagttgtcaaaaatacatacaaatgcaccttaataactcatataataaatatgttagtcgtacagaagaaggggacatatcttgttctctttctgcctctatcaggcttgtcaatacatcaaatattattttaaaatggcttgtcacatcctttgaaagacggagaggatccaaatttcaaatttccaatttcatcaagggaagttacccgcaaaacataaatattatcattttgatcttttttttttcattaaaaactggaaaacttaccctttagaaatgttatttttcacgaaaatctaatggctattgtctttttctgaaaaataatgtatattcacttctattgtttcagaaactgtacttctattgttttatccaagacaagaaaacacaatacatacgacacaaataaaagtggtcgagcatttctaaatcaagactgtatagtattttagtatcaattcgtttacttcttaagacacatatacatgaaacgttttgtcaagaagaatagaaaaatagttgatcttattacttcaatttcaaaagattgttaagttttagtgttttttctttctttctctttttgtgtttaaagaagtattgaatagaagtttatgattaatttttagtaaaaatcaagaaaaggccttacttgtaaaatcttcgtaagcaataattactaaaacataaatgtaatttatagaattaggtatctaacgattagctcctggaaataaacaacaataatttttgtgttttatattagttgtacgcaagtatttaaagtaaaagagaatattcatattggacactaaccttaatatgtatatatataaacaagatggagagaaaatagcatttcaggtctagcagtagaattaacctcttttttttatttaaacagcagattgacaacttatctgtatggtagaaaaatataataagatatattaataagttatcgaaagaaattgaaagattcatattgatagaaaaaagtttcacactgattcagatctatggttttgggcttgtggtcatcagaaatttaatagcaattttatggggagatatttactaaaatttttcattagaaaaaattgtatatcaggaagatgccctttttaagttatatgtcttaaatttagattatattattcaattttaaaatggaattttgtaactaatgttatttagttgtttagcaaatcaatgtttggggttaattggtattgtaggagagggaggataaatagcaaatggttttcttgacgtagaaacagaattggtatcgtaagtaatattataaatttggaaaactaattaatatacttacttgtttaaagcgatatcatatctcaagggtcaagcttctatttgataatgttacaaagactacaatatcctcttttttcaatcctatagtcactctgaaatttttaatatagaatatatatggacaaaaatctaattttatgagtagatattctatttgacgatacttatattaaagtctatagtggatttgatgctatgtagttatatagttaaaaaaaattcaatagaggattttttgtcttatttcactaaaacactcaccgctcttccaatttctatgcattcttgagtctttaaatcaatcagtttgagtgcatttaatgtggaataatagcctggtctaattgccacaaacgataaatctacaaaatatgattcatgaggattaattataggcactttataatcgttcgataataaaatgagcccctcagtcatttgtctctgtctttgaatccaagttgtctttttctctaaagtttgtaatccattatttctcaagtttatagattgtgttattaaagttggactctgattattataatatattactgaatctaatggttgcgaagacatattagttatctgtaacctcaatataaatttattaccactttcagaagtcattgtgtcattaatgaacttgaatttaatgttactattattaggattaattgttatttgttgctgttgttgttgttgttgtacaaattgtcctgctttgtatccagaatatctattttgattagcattcactatcgtgctattattaaacttagcaatagaacttaaggaaatggttgatatccttgataatgtagcagtattatttaaaagtatattgttcccattggcttgactaggtatttgaattaattgccctgtatttgaaccagtaaatgaatcacgcccgtttagtcttcttcttatggtgacatccgtctcccactcagtaagaatattaaactttaaatcttcgtctaaattaactaagtattttaatgtgattcttactctgtgtggtttaatgtcgatattttcattatcattgaaatcttgtgccatttgatagacattgtcagaaattaaaggtggtggtaatttgtacgccatactgaaagaatcatatggataaacaatcaataggcttttatcttttgcctcgttatagaacccttgacccttcattggttctatttcaatatgaaagtcatgtttattgattgattccttattgatcaattccaatttaatcaaatcaaatttgaaatgcgtcctacctaatggtattgaatatttattacatagatgggttaacgatcttgaagtttgaaaatccaatgatgttaatatacaatattgtgattttaaataggaatttcttaacctcatgtttaataatgaatatattggatattgaaattctagtgaatgtgactccatattttggtaatcagatatctctttaatttgttgtgtgtcattttgtatagtcatattttgtttcagatttgttgtatccctcatattatcccagatatagataggttcaaagctgggtaaaacactatcatctggatcatcaattaatgatgagtcagatagttgttgggtggttgattcaatgtttcttttagtgctcatagtactactaccagtcttaatgaatatatctttattaatctgatacttcacttgaaatttgattacattgtcatatccattattcatcactacattagatttgaagagatatttcgaacatatattttcttttaagacccaatgattttttgataattccctaaaataatcaagtgtaggtccttgtatcaatatagcctcatttatccaaacagtaaaattgcctaaggtgatttgatttatatcatctggtttttggagatctttattgaaccataaatggatggtgaaacgctcatcaaagaaaataaactgtcttttattttgtttttgatcaacccaatcagtagtgtccaatggtacactatattgcatcttcctttttgtaattttataattttgtaggtacgttgttttttctatacacctggatacttactactagaaggttgtatagttgtatatatatgtatgtatgtacatataggcatatgtacacatgtgtgtgtgcgtatatctttagctttttttatgttaatattcgaattttatttattgtttgtcttctttagttagaacttcatgaaagaaaatgtactcgtactaagagagcatgtacagtgtagaggcaaaaaatagaagaataagtaatacataagtagtatgtaagtgtgtattgtatatacaagggatatatatatatatataaagagagagagagatgatatatatctgtatagaggaatgcagtaacatatttaaaaataccactgtatgttcttttttttcactctgattcatttaaacatatatcattctaccattctcatcaaattctatacgacgatcctttttattatcacggtttccactaccataacggtaagcatatttgtaggcaggaacgtcagtgactttaaattgtgatctttcaccagctaagacaggaccatagacgattcttgtcttatgcagttttttattttgtgaattgctatgattagcagaatgttcaccttctgtggccaatctttctaacgtcttgacggcaggttctaaatctaatactgctgctgcatccaacggaccaaatggttctgattcagccaatgtaataaatctggatttctttgcgttagatgggattggaatctcagataagttttctcgtcttgaattgatgatgttttgataacttgaaccattatctggtgactcagttgaggttggtaggttaaatagagggaacatttgttccattgtagtggccattttatctacatcggtattaatttttttacttttcaactttctctgttctctttgttcttccaattggtagagtttagataatgcttccacacgggctacttttaacccatatttttgcgacacttcttgtgtggagagaccagttacatttagatcttcaaagatctgcttttttaggtttgaatctacccaataattcgtcaaacagaatttattttcagggaaaggttgtctccaacggttgttgctagtatgactgaacttagtggactcgttctcattagaaatgggttcaaattttagttgttcgtaaccattagagtcaatccaggtctttggttccaagatttctccagtggttgggtctctcaagggtctaccacgttccaaatctggctggatatatttaggtgtgtggtttgtagcaggagaggcatatctgtttagtggatattcacctttatagttttttggaccaaggaattgcctcatggcatatctcagattggtgtcatgtttccaaggactttgtctgtttaatttcaaaaaattgtaacgtggataaactattcttctgcctgaaagatgtctaagttggatgaatacagtcatttagtttgtgaaataaataaaaaaaagaaagaaagaaaggaaaaaaaaaatgcaaaactttcttgttggatggttgaatgtgtgggatactactggaaacaaaaccagttgtttattttctttaccttcattcatttcatcctccttgtctgtcttctgttaaaatcaaatacaaagcaccataatgaaaatgaaaaataaaatatacaaaaaaaaaagcagggtccttttcaaattttccactttttttcctttttttttatttcctagttttccagcatagatgttgtttggtagctccatacaaataggtcagtggaaaattgtcagttttcgaaaaattcgaagtaaaaagagtaaaaaaattgattgttctggacgatgacccgcaaacctttttgatttgcaaaagtgttaaatatgtatgatagttgtgtagtgtattgtagtatattgtagtgcactatagagtttgtggttattacatgtgtttattgcttgtgcgtctgtatttattagaagaatagaggagataaatataaaagagagcgtagggaaattgattgattggcgaccgattccagatttcacagaacggaacacaaaatacaataagaataacaataatcatacaattactatttgaaaaatgcaagccccagtcgttgtgatgaacacctctgctcaagagaggacttctggccgtcaagcccaggtgtccaatattactgctgctaaggctgtttccgatatcattagaacttgtcttggtcccaaggcaatgttgaaaatgttattggacccaatgggtggtctggtgttgactaacgacggtcatgctattctaagagaaattgatgtggctcacccagctgctaagtcaatgttggaactatcaaggacacaggatgaagaagtaggtgacggtaccacctccgtcattatcttagctggtgagatcttggctcaatgcgcaccatatttgattgaaaaaaacattcacccagtcatcattatacaagctttgaaactggctctgaatgatgcattagaaattatcaatcaagtctctaaacctgttgatgtcgataacgacgccgctatgctacaattgatccaagcctctataggcaccaaatacgtcaaattatggtctgaaaaaatgtgccagttggctttgacagcagtaagaatggttcatgatgatcgtggagacatagatatcaaaagatatgttagaattgaaaagattccaggcggtgaggttatggattctcatgtcctaaacggggttatgttaaataaggatgtcgtacatccaaagatgtctcgttatgtagaaaaacctcgtgtcattttattggattgtccattggaatataaaaagggggagtcccagactaatatcgaaatcacaaaggaggaggattggaacagaatcctacagatcgaagaggaacaagtacaaagcatgtgtgagcaaattttgcaatttaaccctgatttggtgatcactgaaaagggagtctcagatttggctcaacatttcctcctaaaaggcggttgtagtgttttaagacgtgttaaaaagactgacaataacagaatctctcgcgtaactggcgccactataataaatcgtgttgaagatttaaaagatactgatgttggtactaaatgtggtgtatttaaagttgaattgataggggatgaatactacactttcttagatgaatgtgaggatccaaaggcttgtacaatcatgttgcgtggtggttcaaaagatatcttaaatgaaattgaacgtaatttacaagatgcaatggccgtgactcgtaatgtcatgctttctccatctttatcacctggtggtggtgctactgagatggctgtctctgttaaattagccgaaagatcaaaacaattagaaggtattcaacaatggccatatcaagctgttgctgacgcaatggaatctataccaagaactttgatccaaaatgctggtggagatccaattagaattctttcccaactaagagctaagcactcacaaggctatcataccatgggtattgatggtgatcaaggtaaaattactgatatggttgaatatggtatttgggaaccagaagttatcaaacaacaatctattaaaactgctattgaaagtgcatgtcttcttttaagagtagatgatattgtaagtggtgttagaaaacaagattaataaagatggtttactctcatcgtatattactattactattatttctttatttctctaaaattactttacaaattatgcatacgtatatatatatatatatatatatatatgttgttattatgtatattatcatactctattttatattacgttttgctatttattatttttgtgagtaataatgtttatttctgatctgggataattcattttcaatttgtaatatcgacgatcttaacctactgcaattgtgttcatcctttaaaatgtgatcttccatttttaatcgcattattttgatcttatttgtaataggtaaatcatattgaccactatttaaaagcaaatcaaacaattcattccaaatatctttctgccatccacgttttaaggattgtctcaattttattctattattaccagaatctgttacagtttccataaattttccaaataacatacaataaataatcccagcaaggccgaaataatcacattcataactccatggcaaaccatgtctcatttcataacaatcttgttcatctataggccaatctgatttgaatcttgtgccattgctgaaaaatgttagatcaaaggagcgcccaaaatcaattaaataaatacccttctgattccaaccttcatcgccaaatctgttataattgcctaattgttctccattaggtataggtaacaatctaatcatacaattatcaggttttaaatcaccatgtataattttaatttcatggagtgcttctattactttaatcaattcaatagtaaaaaatatacaaaccaattcatctaatgttttataaccattcatatcttcacggtacaggttgaccaaatccaaaatagttccttgatttgcataatttagtatcagataactttcatcttgaaagaaatgtaatgaatttatattaattattgatcttaatacattgtgttgatccttcagtctcaattcaacttgccttagtatataatattcccatgagtttgctggtttttctacttttaacgcatttagagatccgtcgtcagattctgctaagtagacaattgcatatccgccacgacccaactctgaatgaatacaataaaatttatttatttttgtaaaattaataatgggaagttttttttgtgagcttttggtaattttatggattctttctaattggtgactcatattcagcttttgattgtatcggaaaaatgaatcatattcagacaagggaggagataatttagatagtagtaattgtcgtaagtcatcacttaacggatgacttataattgatggcaattggactaattcattttcatttttagaatttttcttttgagaaaatatacttggttgagagataaaaggtgaactttgagattgtaatgcttgggatggttgatatattggtgtatgaattgagttttctgttctttcttcaatagggtatatattaccatagtgatcttcattaggtataatgttgtttattgagattggatttgaacttggattcggcacatccgttttggagatgctgtctacctgatttgtatcttctggaactttcacttcagtaagatcatctatattaggtcttgtaagatcttgtgttatattttcatatatagaaaatttatttgtggtattatcagtagtataattattaattttatgattatcgttaagaatattagtattgattttattagtttgaccagagtggtttatatccttaatactagaattattattttcatttaaattttgattaaacatgcaataaacttcatttatagcatctttagagaaaaatgtcactgtgttagtattatttgtcgttaagttattatcttcttcttcttttaatggtagaagtgatattttggtgttatattctactgtagcatctctatcatcaaatatctgaattttactattatttattggtggttgagaagacggtagttgttccatcatcttttgtcttttgattgagttactttcatcggtgtcaatattgataacttcaaatgcatttcttttaacggaatttttcggttgtgcctgtacagataatgatgatgatagcaaaccaggattttctatgtttcgaggagatggtttcattaatgaaagcaattcttcaaaacctatttcaccatattgatattttgaattatagattaaatcgaaattacaatcgattttctcaggtagtctaccttcaatttgatttatctgataaacagggcttggcttcggtttactaatttttgatgtatctgtagtgtctgcaaaaatttgtaaaggcgtttgccgaactggtgatacaattttggatatgttatgatttgtgcctgtgtttgtgcttgttattttatgtgttataaaacttggtgtatttgaattttgtattagctcctgtatgaagatatcccagtgattcattggaaaaggtgtaatatgaattttcatttctaataacctttgatgtaaatctttcaacatatcttgcaacctttttataggtcgtgaattttgtttcataccatattcgagaatcaacaaacttttatcaaattgttttaaattccaaaacatgttggcccattcaatataaagcatagccaatctttgaccaaccccgttcaaaaacataaataataaattattttgatattgaatcacatcattatcaaaaatgaaaagatccaaataaaagaaccaaattttgacaaaccttggatcattggaatacgtacccaacacaaagatgtaattgatacatctttctaatagtagttttaatttattctcaaaatatggtagtccaagatcattaataaaattgatatattccaaaaataattccaaaggatcatctaaatcttctaattcatttaatagcctattttcaaagaatagaaatttttcttcgtacctatttacctcattgttaatgttatggttacggttatggttatgaacaggactattttcattattatgactatcaatatcctcattgttttcatgatatacttgctgtgcaagcattctacttttcaaatatatgtttgtataatctataatttacacaacaactacagtcagtgttattttatagaaaaatagttcatttcaaaatctgtaaatactattatcacacattctctttgtttgttctgcaatttcgattttgttgtctttaaggcattttcttatttcttctatagttctttttttattttttcggttaaaggtaaaaatattcaaatgcaatatatatatacacatttttgtatatatgtatatttatacatgtatgtatatatatgtgtgtaataaaaatagaaatatactgtgcttcagaatttttcagttgttccaagatgacaacaacagaattattattgacattgggaatgtaactaagttcaatgcataatacaaatgagcacacgagttatagatacgacagatctacttattttttttcaaatcatgaaaaagacagtttattaatgcgttgctcattatatatatattaatattaatgtttaacagtatagagtgtaaattttttaatattaaatagtaacttatcatctaataatttggtaaatttcacaagaggaagcaaaagtctttattccatctatcaaaaaagtgttcatgctataaagcattaatatatttttctaaattcacatggaacttgattcatatagtcggtaaatccactatcatgcttagctgtactacattatagatatttaaatttataaaaataagtatctaagatgtcatccaaatttagtgaccatgattatttgatatattattaatatgtatatgttataaacataaaaatagaacatgtaaaatttctatttttgctagactcttgttccctatatatatttactttgtagttagtattcccacattaggttaatcacactctaaatatcttcaattcatatatattaatcacctggattgattcttattatttattatattcataaatgggtcatgaccattggcatttggataaattcttattgataagtgtttgtatttctagaaacttttattacggttatcttaagagttttggatagaggactataaaactatctaattaaaggaacagccggtcttctaataagatatgtattgctttattttaacattgttaaccactatctaacatagatgaataacccttaataaaaacaacgttaaccattcaaagaaaaataactccaaccctaaaaagaagtagaaaataaaatagtagttaatgttttttccctaacattgttcttagggtttgcaatcccaattttatctaccaaattaggaaatttctttaaacatttgtctaatagaacaattatctatgtttgtaaagcttttatttatccatctccataataacaaattggtaaagattttttttaccttggagatattattaacttttgattcagtttgttttcttcatcttagagggggaaacgagatacaaatatcactcttttttttttttgttacaatgtcatacacacgtgattgcaacacaatattaatttttttcatttatttcttagtacatcattgatctaatacatgtattacttttgttcgtttttctgaatgagtagattaatttttgatataaatgaatttttttcaaaaaatgacaatattccagagaatcgacaaaacttcttacaacagtataggatatttgcacaattcattgacatagaatatgtaccgtttgattcttctaacaagtattttagtaaattattaatacgaaatttatcaatatttgaatcaaacagaagtttaaataccgaaactacatcatttcatctatacatggaggaaaatacatttgttcaattgtttattaatgaagaaactaagatagatttgcaaccaggtgaccccgttgatatccaagcagttacatggtatgactacgatgataacaatacaatcatattagaatccgtaaatctccgaccgattacaattaaagaaatcgatgcattaaaagagttcatcttatctccagaaggtcgatactttattaatccgtaatgttagttaggatattaataagaacctttttcttcgagtgtttgatcatattcattattttatttataatgctctacttagtcatcttttctccttttaattttttgagaaatctataataaaccggaaaaaaagtatataaataagctaatttacaataccgttatccactttctacatatatatatatataattaaatatgtaattagttaaacaatatgttaaaatcatcaagattctatattgttttcatcaaaaaaaaattgttggaaggtgatttatcggataagatgataacaaatgagaatatgttgcaaaaatcatcaataactgcttgcttaatattaaaatgcaattttcttgacattccttcttttgtttttcaataaaatcttttgtttttgtaattcttcttcttcctcttcttcactatcaatttccatttcctcttcttcttcacttatctcctctctttcttgttccttggctagtttgttagcaatttcaacttctctgattctcaataattctgggttagcttcaactagcttcttgtctcttaagaactctctttctttattacccttcattctgttcttatagaatgctctttcacgtttctgtctaatttcttcaattcttgccatagcctttagagtagtggcgactaattccctattatatctaacaggaacgtttcttctttgtgcaaatgttaatgtagaatcaacagccagttccttgcctgcagcctttctgaaagctttagtccatttcaacttacgtggattacggcgttgcttgaatgccttgtgacacttggaacggcaaaatctaaactctttggcatcattacgaacaaacatgataccatggccaggatatactggagatgagcagaaatgacattgataaattctcattatgactcagatatatagatatatgtagatatgtgtgtatttgtgtagttttgtttcaccttctttagctaatcgtataagttatttgataaaataaatatttgaccttttcaaatcggcaaatacgtattacccaaagatagttagcaatattatgcacaaaatatctatcaaactttattataattattcaatcaaaaaatgtgtgggattgagatgagatgaaatttccatttaataataaaatttcactttgttgatccttcagcaaaaagaaaaaaaaaattttttttttcttaaccaatactttcctttttaggtttataagtaaatttttttcgatctttttaatgttaaaaatattttaaaaattgacaataattgttaaaacagacagaaagagagagagatggaagacaataatataagattaaagattgctttgttaatgcagctcaaggtacctattaagcaaattgtattggtagataatactgctattgtatcttaaactaattttcttcaagtgataaaaaaaacgcatataaagaaaataagatcaaaagattggaacaaaagagagcttaataaaatagatagtgattttgtattaaaatatgtctttacctcaaggtgtttccgaaaataagaatattaataataattctattgctgtttctttagaaaatattaatgggcaaaatcaacaacaggcttcttctgtacagttacagcaaaaatcaaaatctggtatggatctttattttgatcaaataactagctacatagggaaacatccttttgttactggagtagggattttctttaccctatatgcatctgcgggtttttataggtttgtatccattaagatgagcggaggcaaagctgccacacaatatttaaaaggtgggtttgaaccaaagatgactacaaaagaggcattacaaattttgaatttacaagagagtaatctaacgaagaagaagttgaaagaagttcatagaaagataatgttagcaaatcatccagataaaggtggatctccatatgttgctacaaaaataaatgaagctaaagattatttagaaaaaaaaggtattgtaagaaaataaacaacctattagaaacaaaactgaaaaagaaaaattaaggtaaaatagagcatcaggcaatattgacactctaatatttaattttaagaaggacgtatggtaatatttaacgataattataaaaaaaaaaattctgtatatagtcgttgttttatttgtataatatatgtgttctaaattagtaagagtgtaattaaataatcatgggtcaaataatgagaacacccgtccatgtgcatatttctttttctgcctatctgtttatctgtttatgtatctgtctattttcttacgacatatacttagattattgtgtgttatatgatatatataccattattcagtagggagttattgcatttatcacaggtttgacttacatgaagcatataatgttggaaacaatccaaatgccatacacgtctttggaaaatcgaattttgttctttattctcaacattacaacaatcagcatttccacacataacaccttgtaatgttaattgttgacactgctgacatagaggtagatcatattcattaagcagataatcacgtagttctgcaatacatcgtaaatctattccaaatctcccatttgagtctcgatagaaccatttcaattcacataattgtaacaataaatcttcaatttctgttgcccccatattctcatattgtaataatttagtagacctagaggtaaaagttatgaaagagttccatctgatgttattttgttctccagacttttcttcatcactgtcatcatcactaaacccattcttcaattctttccgctggtatgaaaacgaagttaacaactggttaatttccttgtatattacactagaatctattgtattgtaagatatagattggatctctgtgctattatttacaaattggtcaattacccatttgataaatgagatttctttttcttgaaatcttgtagccaattttgtttcttcactggattccatattgatatagacataaaatttattactctccggtaagattatactaagtattttgttattatttttatcaatggtccctatattagcaccactatcatcttcataattattattattattattattattttcctcattattatccatatcagacttttcaaataggttaaatctttgtttatttttcaaggtcactgcatgtttccccatgccatgactaatttttactattttgtaatttaaagtgttcaatttaatattaatctcattaataacattattcaattccacgttccatttttggattggccatgatggatcaaattcatcaaaatctattttcaatcttattagtgccaaaattaaagcattttcatgacatatacctcttgcagtcagtatgtagttcaacaaaaggcgtgctatattgctgttttgagtcatattatcttaacacaaaagactacaaataataaagaaaaaagtgcgtttaaaatggatctactttttagtgaattttttttgttatcagtgtgtgtgtacatatataacagttattcataagaagaaaagaaaagaaaaaacaataaattatcccacacatttaatcaataaaaacactagaagctacatggaaaatttggtcgagaatagtattagacacaacccgtccttcaactattgatcttaatcatcgatggggtagtaaactgatattttaaaaagaaaagtctttgatgaaaaagtaaaaaaaaaaacttgctccggtcaagaatcgaacatcagcacgtttctttaacttaaaatcaggttaatttcttatgaaagcaaagaaagaagaaaaagtccgtgggccaatttttttttaaaagaatattcccctttgttttttttttcaatcctggtatttgcataatttagggatcccttaaagcgaataaatatttaagctgagtatttgcatatttaataaatacagcatttctttttcttcagttagataaaaaaaaaaaaaaaggtttttttattaaagtttggttctcggccgagaggttttcgttcgagagaactttgcagaatcctttctttgtcattgtgatcaattaatggattgatcgttatgattattacagcatctcgaagctcggataagtacttgacacaactttgtgagtaagatgatgtcgaattaaacacagaagttcgattcaatcaacaattgacaccgttgtccaatggaagtcatagtggaacaaaatatcaaaaaacgtttaattcttctttttcttttttttctttgtttttaactaatcttatcagttaatgaaatattattgtttgttactcattgcatgcccaccttagaacttcttaatatgaaataacgaactaaaaatacatttttttaaactcatttgttttttgttcattcatttaactattttagaacacacacacatacacacacatatatatatatataagagggctgtagattgctgttttatttaccaatatctagactagtcatattctattctatgataaataatttccatagtattatatatatatatattgttaagtgatgagaatggtgccagtagagaaagtgaaaatagtaacataagataactagaaagatataatattgtgatacctaacgtaatgttttcaatcacagatattgagaaggcagcagaacttaacaagcaacaatcagaggtttcatttaccactaacgatgaagaaaaattgtttggtggtgaagtatctactcatgacgaatcaattaatgatgatcaagacgttgccttaaggtttttgaaacaaaatcacattacttttgatcaattgtctgaagatgatttgcaaaataataatattcctattgatgaaacaaaagtgatcttttatggttctcataaaactaatctaaaaataataagaaaagtagactatgtaatcttaccatttttgtgtctaacttatcttttcatgtttttagataaagctctgttgaattatgctgcttcaatgggtattaagagaaatttgaagggtaacgaattttctaatttaggtactattttttcagctgcttatatctttatggagcctgtcgtcacctatattattcaaaggtatcctgtttctaaagttatgggtattttcatcacaatttggggaatagttcttgcctgtcattccgcatgcaaaacatacgcttctttgatgattgtaagaactttattaggtttttttgaggcctcctctgctgtcggttgtatcacaatcagtggcatgtactatactaaatcagaacagagtgcaagaattggtttttgggctacacaagcaggcactggttatgttgttggcggattgatatcttttggatttcaacactatcatagtgaacacttcacgtcttggcaaatcatgtttcttgttgtcggattagtcactgttgcatttggtctcttaacttttttttatttgcctgataacgtaacaaacgcatggtttttaacacaggaggagaaattggaagttgtgggacatattagagctaaccaaaccggattggagactaagaagtttaaaaaacaccaaatcaaagaattattttttaaggataagttaacttggtcaatgcttttactaactgcatgttctcaaataagtactggtgctattggtacattttctgttacaattacaagtacttttggttttgatggttataggtccgctttattacaattgccaattggtggcttagtcgccttaatcatcatcatcactacccagatgatctccaaatggggtcaattgacactgatcactacattgatgtatatcccagcagttattggtgctattgttttgattactttaccattatcacattccgttggcaatctattagggttatatctaatttacagtggttcatgtgtcatcactaatatttatatctggaattcatgtaatacctcgggttacacaaaaagaatctttagaaatgctgttactatggttgtgtacaacatttcatgtattgtggcacctcaaatgtttagagttaaagatgcaccaatgtatatgccagctaagattacgctgttagttacacaagcagtttgtatcccattgcagttatttgttggttacttatgtcataaagaaaatactaaaagagataaggaacaagcaggtagaaatattgagaaatacaaattcgctgatttgactgatattgaaaatagaagttttaggtatattgtctaattactttgtctagagtgaggtaccatacaaatttgtctttaaataactaattttttctttttcttattaaccatattttattattcaaggttgtcctacttcttattatttaatgtgatagactttctctttatattaatttattgattgttaaataactgggcttgtaaaaatatataattttttgtaatctattctaaaataataatgtttgatcaatattctaatctatttttgatatgagagacatttatttttttttaattaaatattagaaaacgatttcaacatattaatatatcaagattagtaagtatttcaactgataattgggttggaatactaactcctacaaaatgtctatagatctaaatattactattgattaaatatgtacgagtcaataattgaaaaagtaaaaattttctaaatctaaaatataaattatacatggaggctaatagcataaattgaaataattgtttcccaaatttttttatcactaacaagtaagcgatttctagtttattgctttttatttatatcttaatctatttttatacattatattaataatataacaaagatcattagtatttacagtgtattcaatagtaaatttaattaaaaattatttctactaagttcagtagtagctagactgtttcttcttttgataattataggataaaaatagacttactatttttaatgactcaaagttaaaataaatttatatgatggggatgttaatgctataaagttagcagaattggatctttttagcgtttatggcagcgacagttaacattaagtcataaaaagtataaaaatttatctttggttttcattgttattttaagtattttccacatcttctcttccatttggtttttgataattaaaaaaaatgtcaaattctaacaattccttttgttttaactgattgtgtttcaataatgtataagatggcttaataaaatatattagtcttccctgtaagatcctttagatacttgagtcctgaaataatatttaatttttgaaaggtattgtttgcaaaaataaagtattatttttttttttactaaaacaaggttgtgatttttatgcaacatttcttgagaaaaattatttgggagttcaaaagaagtaatattaatattttttattttctttgtaactcgttaaaaaaaataaatctcagttgcaattggaaaagtatatcagttattttttcatagttttctttatttattgattgtgatttaaatttttaaaattggaaaagttaaaaaatggtaaagtttgagattagtatattttagagtagttatttattgatattttgatatatttaaataagttttcagaaatggaatttaccaaatttgtttacctttttagatgaataaagttacacccttttaccagttaagttttttatcttataagaatatacatttaagatctacctaagattagtagtatggttagatgataaaattatcaaaatatttatattgtatcaataacttctgtctcttgtatataaagtctaaatacaattatgtataaatgtaaaatttcttaaattgaatattttataaagaaaagataaaccaataagaatttatccaaatccgcttagttattaccaattatcaatataaaaaccattgaattttcatcatgaaattaatacatataaatttggattgtaataaactcaatatagaaattataacttacattattgtttagattcagtataacttattcattgagcataaatatatttagtaggaatagagactagaaattaatatgtataggaaacaagagtttagtactattgaaattttttttcatctactgtttttatgacattttatcattttatttgtatataatatagactttttcaagatatatactcagcaatgttaagaatgtcaaccctaagcaacaacgtagatgctgagttttattaaaaatatagttacataaaaagtatgaagaaaagttctaaaaacatattttaaccttctttttataatcctaatgtataattttagctttgagacaaaatatttttcttgcttatttctttactaatatttctattattgggtttaataatattataagtgattattttttattggtgctcctctaattaatatcaaaaaaaaatttttttcttcctagtatttgttcaatactttaatattaactaattcagtatatgaagctgttaagaatgagcgcctgtagtcattgaatatatagtaaacattctcaatattttattaggtagatttagtatacaaaattataataaagttcttcggtttttttatttatgtatataatgtataatgataaaatataggggatgagcaagggaagaaacatgatatgaaaaaaatgttggctttatatattttcatatctcgtctatctcgtctatgtacggcaccaaatttatgatgaagttcgtttatgtctactgataaacaaacaatatattcttcactttttgcttttcaattaatgtttattataatctaattggcctagtatttattctagaatgtttgattccagcaaaagttttgttttaattaagcatgtgaatttgtttattgtactatggtttttgtatttttgtgcaaaataattgtttaatgtgtaaaaccaattttaactaactgaaaaaaaaattattgacaaacaaaaactactccacaaatcagaaattagattctcaaaatagacgaatcatttcttacctttacttcattgaaaaaaaaaaataaaatctaagttgtttataaaagatgataataatacctaaaagaattgacattcaaaaaaatataatctgcaaaacagaatcttatggataaatgctggaatcaaacattctagaataaatactaggccaattagattataataaacattaattgaaaagcaaaaagtgaagaatatattgtttgtttatcagtagacataaacgaacttcatcataaatttggtgccgtacatagacgagatagacgagatatgaaaatatataaagccaacatttttttcatatcatgtttcttcccttgctcatcccctatattttatcattatacattatatacataaataaaaaaatcgaagaactttattataattttgtatactaaatctacctaataaaatattgagaatgtttactatatattcaatgactacaggcgctcattctcaacaatcagacttatatttcttgctacaaaatattacataatctcagagatataaactgtatttagatttgaaatggtaaaataatttaaagcttctatactaaaattaataaaacttattgtaaatttaaaataataaaaacaaaaattgacaaaataaaaagttaatatacaaaaaaatgtgttttatatattttattccttactcctttgtccataatgtttcctagtacattagcttttcaaatacatcatacacaagatctatatttcgtataacatgatactgtatatcaaaagtaaacaaaaaagaactgcgcaagcccggaatcgaaccgggggcccaacgatggcaacgttggattttaccactaaaccacttgcgcctcagctgttgcctgttgttgtagtatggtgtggtgaagttctttgtgtattccagggaagcgcaaataatattaatagtaattcaaataatcgagacagtaatcaactatagtcgatagtataattactaaaacggtcttatatattaagcggcttatatcgagctaatgtacttattcgaagttacttgacttgttacttgcttgttctattttgtttatacataatatataaattatttacaagaaacgattatggaagatgatcttttatctcctgaaaacgttgtccttttatatgttttctggagctcgatcgattattcagattactacattaatgacttgactgattcaaaccctaaaatttattatattaatttaggtgcactactggattagaactgcatcccaattctctaatcatggtgattagtaatacacgtgggacttaataaaacaataggtaaattctagatttgccaagatcttatgtaatccaatctttttattatgcagctgttggaatttggagccttctgcgtccatggtaatgatagacatcattaagttatagatacttgttatgtttttgtattaaatacctgtacatatttattatatagtatattcagtatacattcttatatttacttcagggcttattttaagtttttcatttcttttcaaatctttgaaagacatatttggtgacaattaaaatgttttcctgatattatgtacatccgtacaccacataatatatagaaaaactaattaaaaataattcttatgaaaatgacagtaataaactctcattttccaacatgcccctttaattggtttttcttataacttcctcctgttcactataacttaatgatttccattaccagcattccagaggacagtgattggaagcaactctttgggtgttaattcatgttgtacaatcattcttaatttatttatatctttattagtagtggattttgttaatggatctgcaggattttcttttccactgatttttcttagacttaagtctgaatctaatattctttcttttaatctttcaattctaagtcccaaaaatttggttcttgctttaaaataatcttgtttcaaccagtccaatgctggtttggaatcagtaattacacatattcttatgtttttaaaatccatcatcttttctaatttcaattttaatagcaatgcaattttctcagcctgatttatggcatctaattcagcttctgctgatgatgtacataaaattgatgatttttttgaaaatccatggaaaaaattgtttcctaaccatattaatgcaccacatcttgatttaagatcaaattcagatgctagcgaagcatctgaaatcaccgtgatgtttgatatattttctacttcttctcttttaaaaacagtctttgtatcttgtgttttataaacatattttagtatttgttcggttaactcaattacctttttatgaggatataaaactaatcgagccattttacttactgcacattctatatcaattcttcctctagacctaatataatttaatttaccgattaactcttgtaaatatcttactttcttcttgtattcctctttagtcataattaatttatcttgttttggatttattttaaacttatcaatatctggaatcatttcttcttttaatttatcatttaatatcattggatgttccttttctaatctctttatatagctagtcatgcttaatgctatctcccctttttcataatcataattcaaatccattcccaaaatatctgtattaagcatattatttttcattccaccaactatttttattgagaattgtttttccaatgtatttataaattcatctaattcttgatctgttctagcagcaattatacaatcatcaacatatgctgctatcattaaattaccatcctttgaaacgaataatccaggtgagtaaatattatcatatagacccataccattcatagactcttttaaggtttcattccatcttttagggctttgttttagtccatacaatgcctttcttaatggagtaacctttcttgcattttttggatgttgtatatacaactcttcatttaaggttgcatataaaaatgcatggttgatatctaaagtctttaatttcatcttcttattgttagcaataatcaatagaattcgcaatgaatcaagacttaaaatggatgtttcaatatcattataactactgcttgtttgttgatcgcctctacaaacaattctggctttataagttccatctctcttaatcgtaaaaatagaatttgttcctacgattttatccttttgtattttacttttgtctatggcaatattcaaatcaattactttcatattaactagattttgtaattctttattatacgcttctatgaatttaatcttttcttctaaattttgattctcagttatagcttgtttataaaataatgctctaatctttctttctggaacactttccccccgtgattcaggtgtgaattcttcccatttttctgtaggagtaatataacgaattatctttttcttcttaaaaatcttcttagggtgtaagtctttattttttttatcaatattagttaaattaatcttggggatattatcaagattggtttcttcgaagttgttttctaataatcttttctttaattctttaattttaggtttccttaaggaagtaaagtttttttttgtccagtctgtagtattggttgatttagttaaattatcttcctcttttggtaatgtagatactagtgaaacagattctttagcatcataatacttttcttgttcttcgtcaatcttagcaacactaatatcattactttccagtgccttttctctttctagaacttgttgtaaactgttattttcattgttcttttccttttcctttttgtgttcagtttctatcttccgttttataaaatttttaacattgtcattaatttcttgatgtaatttattattagttgatctcaatgattttgatgatttctttaaattatgtcctatctgacctgttatgtttgtatccattgttgttatttcttcatgtttcaaaatattttctgcgccttcattattgcttaattctatttctgatactttccgttgttcaacattatctttttctttttgtgtgtcttcttgttctatattaagagtatcaggttcctgtagtgttatattgaggtcattctctaagactagttgtttatcagtttctaatttcttttctgttgtatgtgtttcgttaagtttctccaaggcatatgctttactatgtttaaatgagtcttcaataatgtttgttttaatttcttcctgttcaatcttatttttcaatatatccttccatttacttaccaatgagtcttgcatgaaactagcttgatcattttcttgagatttatatgtgctgtttaattccggatattgttcgacaccagtatttttattattatcattataattagtttctggttcatatttgttcacattcagttcatcttgttcatcctgttctgtgtctacagtattttgagaagtaatcagctcttctcctaatgactctcttgattccgtttcctcgctgatatgttcttcttcaacttcaaaatcgtcaaacaattcatctaatttaatattttctatgcttctaggttcaataattggcgttacatcgttaatttcttcttggatgtcatttagtaaatgttctttaactcttatttcatcttcgtgtaaaacatctaccagattatcatgttcattttcaaaatctgatggtaacaatgttactatttcattctcgtcataatcaatgtcatttatatctccaattttgtttttgacctcatgtaaaaatgtaccaataatatcatatcctttcttctcatttaaactgtgatttattgtataatctggtaatatataatttgtggtacttatcactcttttttcttttggtacataaaaataatatccaaaaccttttggatccttggatagtgttatagccctttttcctggtgcttctgtttttctgcttctgtaatcccatatcatagctggggcaccaaatggtatgaatgatcttaatttaattttcactttatgttttgatattttcattaatggtgattctccaacatttttgttatatacgcagtttctcacattcactgaagctttagctgcatatgtccaaaaccttaagggaagtcttgattgtagcaataatgttcttgtgtcctcaataattgttcttatacctctttcagctcttccattagcttggtgatcttcagtagaagtatatataatattaataccgttttcgtgagctaattcttcaactacgtgattgtcaaactctttacccctatccatgattaactctttaacttttacatcgaattgtttttcaatccaatttatattgtatccaatttgttctcctatttcatttttatttttcttgatatgggttgttgcaataataaatctcgatacactatccaccattatgagtaaatatctttctttaacatgctcaacaggaccaaatatatccaagctccaagaagcacctggttccttttgtgaagtgtagtgattcatagaaccagtataatgaaagtgtcgatgtaatttacctgaagcgcatatctcacaccatatatttttagaattttttttatcatttatcattttcacatcatcaaaattgttcatttctattgattttattattccactggctggaaaatgatttaaacgtaagtgagcttctaaaagtgtgatattaggttttatcgctaatggattaataggtttaactgctctaattatcttatcagtcatcttgacagctataattttatctgtatcgacccatatggtgtttcctaattttaaggttttcgtatcaaactcattttctttgttcactagcgattcataccctttgtctaaggtaatgccagtttcttgatatagtttgtctgcagacaaaattgttgcatcttgttttggagaatagtatgctgtaacaccaattattttatttctacctcctttaattggtagtatcccttctccaagtatttctattgggtttctatcatcccctacaccccaatattctggtccttttatcaatgatgaaaagtttaataaccagtctttattgtgtaccaaatgtataccagcagctgtatcaataactactttgtcattagttttattttttgagtatgttttttttatctttatattgtacttattatgtatatctttaatgtttgattcttttcgagtctgttgttttttgttcttttcgattttcatattcttttctctggaatctatgttagtattcatgttcttcatttctttcttgatggtattcagttcatttaccttttcttttattgatctagtgttctgattcattgatttcaccaggcctaagtaacttcttctcttccttgtcttctttcttattataatttattcctttcaagtaagtattgttattattgatttttctacaatttttggcataatgtaaacacgaattacagttaatacatcttcttttttcaatacgggttaaattttttgattcacagtattctatattcatcaatctaattgaatcccgaattgcttttatatattgttcaacattcaattgccttaagtcaccttttaatttaccggttaaaaaattgttaatcatttcttgttttacgttttttgttaatgattcttcaatttttgtttttaaaaagttatcatttattctatagaaatcatcttttacatggctccatttctctaagttcaccatgtacataaattccttggtaatcctttctggttcagtacagaactcatcaacaatcagttctttccacattctgtccttaactcttctagggaattcttcacctagtagctgtttaataaacaaaatagcttcaatacctgatttttcatccaagtcaaaattttccatatcatcagtcatagaattaataacaatgtttctaattatttcctcttcatttttatctatttctattttacctgtcaattgtgtaacatcatcaaagttccatgattttagatatctggataatgatctgaaccagattggaatttcctcaattttagataatttcttgttaaatttatagttatcattttcatagtaatatttaataatattgccatctaaatttttaaaagtataataaaaaccatattcatctttctttgataaaagtatgtaacctttataattatttatttcttgattctttggaataagatctatcttttgttcaacatctatatttttttctatgtgaacattgtccatgtcttttccaatttttaaaatcttttgtagggcctcaatcaattcccctaactctttagttttctttgtcttttcacttacagtcaaatctgtattagatatgacttgtacaatttcttttttcaagtcattgatttgatcattgatgattttatcgttcccagtatcgttatcatcaacaacggcgacgctaccatgttggaatttggagccttctgcgtccatggtaatgatagacatcattaagttatagatacttgttatgtttttgtattaaatacctgtacatatttattatatagtatattcagtatacattcttatatttacttcagggcttattttaagtttttcatttcttttcaaatctttgaaagacatatttggtgacaattaaaatgttttcctgatattatgtacatccgtacaccacataatatatagaaaaactaattaaaaataattcttatgaaaatgacagtaataaactctcattttccaacagcagcatctaatgttgtagcacatgtatggcttattaatacactaattggttctagattcattcaggatcttatgtaatcttgatggttataactattctattccacaacacctgttacagtttggacttaggatcaatttttttttttttaacagtactattgaacgaatagtaagggcaataacaaatatataagaacgttatatatatctaggagaattaaacgattattgcttgttttttttgtattatacaatgtgctacatataattttaaatcaaccaaacatataaatttagataccaagatactggtcctttatatatgaactatgggttgatagtttcttatttgaggttctgtaacgactgtcaccgtagatacatttctccttaattagctatttaatgtttcatgaatgtttcattttgttacctagtattcaacaatcacatgggatttatcaacaaaccctaagtcctataaatccaaactagaacttttcttgacaatcatcacaaaaccctaacaatatttttataatcataatatcaaggttgatctacaacagggtacaacggttgaggcgcaagtggtttagtggtaaaatccaacgttgccatcgttgggcccccggttcgattccgggcttgcgcagttcttttttgtttacttttgatatacagtatcatgttatacgaaatatagatcttgtatataacagatgaagacctattacgagagatatattcttctagaatgtaaaattagatgaaatgatttttgggtgtcttctgtatatgcaaataatatatatatgtttataaaaaaagaaaagtgcaatatcctgttcagctgtttacgatgattaatagcccttttagtaataatctctaaaaacaccattatatcaagtaaatccatacaccacaaataaaatcttcccagtaaacaatatgtcacaaaaaattcaataaacacagtaaaaaaatattaaaccaatatctcacatcataaagtagcacctagtatatattaattatatgctatccaagaacagcttacttttctatgttaattattattatctctttatttatttactattcttatacattgtaggatttcgttcatttatagataagctatttgtatcttgcaggaaatcagatattatatatttcctatatttgtacaaattattatatcaattctctctgattcttttaactataaaatattatatagaaacacactccagctataaatattttatgctccagctgtatttttattccaatatcaaataatttttgaaatcaaatcatccttattatcatgcttatgaaagaacctatacaaatttatatttgtgttttaatactataaatatatttgctatgcaagcatgcatgtaacttgcataaaaaaaataaaaaccaaaaaaatagaacaaagtacattcatattttattttatcgtcaaaccatctttttatttttagtaaatctctatctatcacaaaaaataaagtgtttatataaattaaccttagcagctacaaacgatatagtgaaaaaagtgcgacccgtatattaaaaaaatctttgaattatagagtagataagtagatcaaatatttgtcgcttttgtccctctgcatatattgttatgaagcacaaaatctcatatttaagataccagttccaatatttgtttttgctgattagctttactagatataaaaaattgcaaaaataatgcaatataattaaaattttttcaacattatagttgtatgttcttgttccttccgactatttccaacctcaatatttagtctaaaaattgatacaatagtatttttttacactacattcttctatacaaagattagattggacatataatgcattaaattttcttttctccataccaattttcattttatttgctatatacctacagcactctagtatatattttacggatttttctagtatttcaactaacagatataattgaacatttgtgcatttacacaactaagaagtgaaaaagatggataataccaaattaaaagagctatgttaagacaaggcgaattgaattatactatcaagtatatcatgccctcatatctcccctgtaaagtattcaatgtaattacttttcagttagtgtctttatacttatcaacaacaaatgtaacagcaatgtgaaaacaatagtcaaatattccttcgaaaattttctacatttttaaaaatataaagaataaagcaaagaattctaatatttttcataaaggcatatttaagaatttctaattttattattaaatttccctgtaacaaatctatcaaagaaatcataagaataacttagcataacacatctctcttttttgtataacagaaactctgaaatttcaacctaaattagttaatcaactgtatcgcccatatttattcctttacacattatatcttttttggtgaaaagctatatatactaacttttagccaatcctctttttagtattgaatatatataaggtcatactggtaacagattctacagaatatagcaagaacaatacattttataatcaaaactcaaaacaattaaaacatagcgtaaaaaattattatatcgtttattttttggaatatttttattatatagtgattaagaaaaatattaaattggacaattaataaactttataaattttttacttaattttgtctagctaggaatggttaatcaacatatctctgttcactcaaataattgacacacacacaatcatcatcacatagacggacaatattatctacagtttcaacaaaattaccacagtcttctttttcagcaggcatcggtttgccatcatccctagaattattttcaaataaagaatcaagaatagatagcttatatccatatttgtctaataaataatttttcagatccttaagcacatattgtattataatagacaattttaatgttacaacatcccaatcttcttccctattattcttcagcacttcgagaatattatcacgcatttgttcctctgtaaaatctaacattttaataattgaaaaaaaatgtgtttggtaaaaaaacttcagcttagcaatatttgttgacagaaataaaatagatgacattttagcaaaatttgagtcaattgacattgtatcattcagttgaaaatttatgaatttatctaaatatttgtggaatttattcataccctttttatctactaaaaaaatatcttgtaaagtgtttaaaaacatgttatgtctataataaacgccattgaataacgttttggaataatccattgcaagcacaattcctttagatatgttgtttagaaccatagtttcatgttgttccaataattcagttacaattccaatagcggtatgtgttattattttctggttggaagccagcaatgcaatactatgtgggatacattttgaaggattgatgtatccacatttcacaataagctttaataatctaatggcagtaactgactcatcagttatagggaaaagacacatatctaaaatattgttaatgaacttgttacttaaagcaaaacagacttcatcattttttggtaatgacatatgggcgttttgttctttggttcttctgtttgaatacattctcccaacaagaccaatttgtcgtagagatctagcctcttctattgagaaaaattctaataaagcctctattattactagtttaatgtccaatctattactcttaaattcacttttcaacatatttaaaatatgtcttgaattaaataattttggataactcccacataacctagttagattcttgatactagttcttcttaaatcatgtggcatactatttctagaaaaaactaaaagacacttagcaacatattcaggtaagccttcttttttgtctacaaatggtaatctatcaattgttgaatcaaatgagcaaaatctagcgaatgaagtaatcaaatatagcaaacgttgaatcttattatctacctggtatttctcttttgatttagcagctgcaattatatagggatttaaatgaacaaggcatgaagagcaagcctgaattatacgtgccttattgtttctttgggatgcagcttgccatataatagaaacagcttcatcaatttcttttgtatttaacctcaccaattgctttaaaagatctgtttcaatattctctagaaaactgtttttcaatatcgatgatttttgcagagttttattaaatacatgcaaaatatcgtagtgtaaaccattcttttccccagataacatatacgggtataaatcaaaaatatgttctttggtaataaatgtttcaacagcatctgcaaataacgccaataacttgaaatgacgttgaaggttaactttttgtttatcatcagttgaattttgtgcttgtaaattgacaatctcttgtaccaggacattgaccatagtacgcaagctttttattatctgattatactgttgaggaggatgaacttcctttttaagcaaataaaagtttaaaaaatcttcaaaaacttctgtgttttttgtatcagtagatataacacctgcaattacagcaattgattgttctataatctttcttttatttgtatctaatttatcactgttatggaaggataacaaccattgtttcaaaagaatatttcttgcattttcgacaataccatcctcctcatcttccaatctcagcaaaatcctaattgcaacatatgtagcaatttctaaatcatcacattccgtatatatttgttcgttaattcttaaaatatgttttctaactaatatactatcgtcatcaaaattaacattaatttgtttgtaatactccacataacaagagccagcattaagtaaatctaaaatggcatctcttacggaggctgcagaattgtccactaaaacttgagttattgcagctttcaccattgggttagatagaatactgctatcttgtgatacgagcaatgaaagggatttgactgctgtagattttagtttaattttgctactatcaagcattgtcaataaaatatggaaatatgtatcatactgagaaataagctcatctgattgtaacactgaacaataatcgttgttaatgtcttctaaagaaagcacatttttaggcattatatcgttaaaaggtacctgtctaataattctgtcgatataattatcaatattggagatgttgttactatctgtgttcaattcatgtaatcttattaatttttccaatagcttaccttgaaagtacttgtaggaagattcctgactattgttattcgctatgtatacaagacaacgttgagaagattctaaaaattgtggaatatactcaggatagttgagaagtttcacaacattattattttgttggggtaaagtatttaattttatatcaaagagtgctgaaccaatttgaccaagaatcaacagacaggtgatttctactacaggagatgtagatgctgaatcaaacacatccaaaagcttacctagcatagatgataatacttgagaagcaatataataatttggaagtctaaacagtgcaattaaatccagaatatatatttccataatatatcgatattttgttgaattttgcaaaaattttttaaatatactttcattaatatgatcaataaaatttgataattgtttttcttgttccatatttttctttttaaacatatcaataatgtctttggtttctccatttacggtatttaaattttctaatgcgttaatatactgtaacattctcattaaacattcagtaaaatatgtaacatatttatccttagcaactgtttttatttttttatgtactcttttggagggcaatttatcgatattagacaagaactcgttaattaggaataatctctgcgttggtactaattgaaaaatagccataagaatctcgcaactaagatttttaatattattccaacaatattgatcagaagcactaacattaaaagtgactgtggaatcaacgattatatctgtaaagacatatatcaactttgttaaaagcccatcatccaaatatatgttttgccgaatataacgaggtaaatgctgaatagaattggtaaataatacaagttcattatgtaaatcttttgacgcactcttctcttttatttctgtgacaaagttagatagatatttaatcggtatcaccgcatatttttccatatatatttctcgttcagatctcttcaacaaaaaaatagaaaatatgatattaatagataatatagctattatttttgttatcctctcttttttcttattagataatacagtagttgtgcaaattgtaatattttgaatcattaaatctaaaattaaaattaaatcatttaaagacaatttattatttacttcaggaacacttgaaatatttttcaacagaagttcaatatgctgtaaagttctttcatttaagcagatattactgttatcaacgttgatccaacgctcaagattggtaaaacattttccattcatgtcggaccgtatatgttctaataattgaattaaatcatctaaatattgttttgcaattgttgtttcacttactgaaacacctgaagacattacaattttatcatgtttaaacttatatgtcaaatctatatcagtgtctaggatatcttccattttccgttttctttgtaaagtttcaacaacatgtgcttcatcaatatgatatccttgtttgatatttggagatatttcctccaaacattttttagccaatggggatagattagaaaataaattattattattgtcatctttattaatcatattcctggactgtttagcaatatatattggtcttttgtaaataattttatttgattcatcagcaacatctttagtgtagtaagtatttctaatactttttggaggaggtatatccaattgatccgtagatttagttatattatttgccaaaagagattgatcatctgatatttcaattttggaagagtacccagacgatatcagtgaaacaagtttagcttttggtactaaatataataatggttggttaggtagtgcttctaggagccgttttggtacaggatcatgttcacctgggaaacttgtcatagccgccacaaaaatcttttttcttttttccttatctgttatatgcagaaaagtagggatatttttattaagtgactatacaatgatgacttgcacttgtttaagctagatataataaacccaacgatactaaaatatattaccagtggcgtctgtgtttaaggttcataggtaagtcaaccgaaaatgtgtatcacttattatttctcgtattattttttatgaatcaaaaaaatctttttaaaaaaaaaaaagagagagagagagaaaaaaaatgatacattagttacacactaaacctatgaaataacaaatataaataaaaatttgaagaggcaatgctatacatcaatattaatattaatgtaatatatcatgacagattaaaatataaagttatataaagaatattaaataagaattgagaaaaagagaacgcatatatatatatatatatatatatttatagacttgtaactcattaagatctattaaatcactttggtcattctacttttcttgtattaaatgtgcaatcaaacagtctataattctaaaaagtaaaattttatttatttttgtatcttcttgacaaaccatatctataaaaatttttatatcattttctgtaatgccgagcgtggaatctaatttttttaatcgtatcactttaatgaggttattgatacattgtaatttaaattttttaaattcttcccctgtggggacaattgtttttggtcccataaggttatcattaggaaacaataatgttctaatggaattgaaagagtatttaatatttttagatattaaggctttctcccatacaattttttgaacaaagtatgaatctataaattgattaatatgtatggatagtaacataaaatgttggatataacgaaaaataatgtaaaatatgggtcttttgttattgagtgataacatttcaatattaattagtgtccatacataagaactcagtacatgcacatcgtttgtactcttaccagtttgaatttttggagaattcattaaattgaaagaaatagtaattaaagagttataaaatttggtaagtttagttttccatgtttgaaatatcaataagtaataattaatattctgaggtgttttccttttcttcttctttttccaattattattatttgcatcttcctctttgattattttatcggacattttcgtaagtattttaaggaaataatacggttctaaacaactatccaatatccttccaaataaaaattgattaaatagtgaatctaaaaaagtatcctgcaagatagatctacagaacagacgactcttaatcaggtctgtaataataaatggatacctatcattttcaatcatagataagtcacaatatattttgtatctaaagggctggcctatctggtgtatatttagtcgtttaattactttaatatgttctgagagtatgactggtatatcgtttaataataatcgaatcatatcaatatttttagtccttgtggagacaaaatttgttaaattatggaataattcaaataatctttccaaaaattcagtatcatcagtatagatctttggtccataccaataattgatgaaatttttcactattaatgccaaaagggcgttaaattctaatgaaccatcattaaaagaacccaaattgtttatttgataatggattgattttgaataaattgaaaaacagagatcttttagatatggggttgaatttttgggatatgaactaatgaagggtggatcttgttctattttaacattgtcatcatcatcatcattagtgttattactattactatactactactactactactaatactaattgaagtcttattttggctaaaaaaggaagtataaccataagatggtatattactgttattcttagatggttccctttttaaatgatcatttttttgaaacctttgaattaaggacgaattagtattatatcgtatagtattcataattatcttattcttttcctctattattcaactcattattgataaattgcacttatctaattctaaagtagtgttatatactcatgtataaaaatacatttattactgtaatggtgaagagagagagacttcctaaggaaccaaaaagtttcttttcttttctttttttttttttttttttttgaaaggattcttaacaactttttagatctcatattcccctttacaaaaaaaaccaatagtcatattaatacatatatatatagggagagagagaaagaaagagaaagagaaaaaaacagaaagataaataaatagaatcagagtaaaattgatttaaagatatttaaagttgaatggatgattcaattatacaaattttggaggaccctggaatagttcattataaacaatactggttaaaagttccgaaaggcacgattcaagatgagatattatcaatatttgcatttggtagatacaaggatttgagtacacacagacttgacctgaccgatttgatgcgacaaaaattacaaaaattgactattatatcgatcatgtgcgattcgaagaggaatagtgatcttccttattctatttttatgaaggaatgtgagatagaggatgtgagtattttggaacggtatttgatcgaactgcaaccattgattcgatgtcgaatagatcaagtgaatcaaacgataagtattgttgaatgtttagattgtagggatatatattgtaatgagaaaccattaccagaattaagtcaggtacctataactaagaataaactaattgaaaatttaagatgttggaaatctaaacttcaagatgacattttatgaagaagaggaaacgaaaaaccaaaaaataaaaaaacaacaacagcgaataatggaataaataaaatatatacataaatattatataaacacataaatacattaaaaacagcggtaaacaaaaacaaccctcttaaaagtcaatttatttattttttcatgactattcttgagtggatgtagaatcaagcttccatagttgtttaactaaaccagtaataccatcattttcagtttctaatttatagataccgaataaagacaatagggaaccagcacttaaaagatacatagcatagttatgccatctcccatagactcttaaagtgatgtaatcagcgatacaggattggaattcaagataagaatagcctaacaaagagacagcgagtatagaatctgtaacggtggccaaaggaccagtagtgaagaaagcagctgtaactaatgggacagaagtcagggcaaaacttttttcgatccaccaatggatggagccttctgttttattgataggtggagctctgtacggatcatttggtgtgccaatgacaccacctggtttttgtggcaacacaggtaagaaaggaatagtgaaggctctctttgaggtagtttgaaacaatctaataaaggttggattcatgtatttcaaaggggccgaagttctcaatagtgtagatctaacaaacattcttactttatctctttttattcaaaactgaattactatctatatctatacctatagttatctatatttgtatatgaacgtgtatgtgaacgcatatatatatatatatatatgtatatatatatatatgtatgtatgtatgtatgtatgtatgtatgtatgtaaacgtgcgtataggtggagaatagatagatggatctaacactttttcttgctataaaaacattagaacctgttagaaaactacaaatataatatacaaaagagaaaaaagacagtatggcaaagacagacaggaagagcgaattaaaggaggaaaagaagcagtaaaagaaaagaaaattacagaaatctcagacatgacaggaaaggtaggtataactaaccctccacgtatctttaaagaaagaattgaaaaaaaaaaaaatgaaaaataagagagaaagaaagaagaaagaagtgtagaagtatctagtaatagagggaagagaaagatgcacgtattatattgcacggggggagacgaatcattctctctaccaatcatctatcaacaaaacaagaacaaatgcaaaaatatattaaacaccagaagacaagagggcaaaaggggaaatgatataagtatttcatgcgtattgtctgtctctctccttctcttcttcaacttcctccattacaaagaaacaaacaaaacaaaataaagagaaaatagcagaggtcagctgaccaacgagaaatctgttgtttttttttttattgttttgctgttaatttctgtcccctatctccccttttttttcttttctttcctttcctttcctactttttttttttctccgttcatccgtcaaactccgaaaaaatgcttggaaataaaataaacaaaaaataaaaataaacaagaacaaaaaaacaagaacattctgcttaacacaaattagaagaataaatagaattgtatcctttttcattggtccaaaaaaaaaaaagagaattacccactgccttaatattataattagctgactttggatttttgtttcatttttatttcatatcgtttactactactagccatcttaaagattccactgtgtgtttgtaaagtctgatcgagctttgcattgtatctcttttatacatcataatgtccttctaatagatttcataccctttcttgcatctactccaccatcttcaacaccgcttttctccgtctctttaagtctcttcccgcctcttccccttcattcaccttctcctatatatatgtcacaaatatcattgttaccatcattactgctctacagttaagatgaagtattgtatgtacatgatagatagacaaatcagaataagggtgcacttacagattataacttaaagatatatataaagatatacatacacatacatacatacatacatacatacatacatacatatatatataataatgagtaaacagaagggaaaaaagaaaaaagataaaacgtaggaatagatgcaaatgcagaaaaaaaaaactatttattttaacaattcttctaaaatgcggttcactgtctcgttatctgatgggtcaagcgacttaatacctaatcgtcttaacacttctacaattttatccttctcaaatccttgagatataaactcctcaacaacttcggaatctatcccatacaattctgcctcgtcaacatctctatctttatttccaccatcattatcctcaccattgccattaccattaccatcaatatccttatcactatcactagcatacaatttggtccataatttggcagtcttattaaatgattctctgtcctttaaataatgacgagcaacctctgcgtcttgtggatcgttgggttcaggtgactgtaaaagtgcttgcaatgaaatcaaagcagatttcaatgttattactggagaccatgcgtccttcaatatatccaaacagatcgcacccgtcacagacgatatatttggatgatagaccttcgtatcaaattgcatctttggcgccttgaatggatactccatcggaacttcaatgtctacaataaatttaccatcttcatacggtgtgcccggtgggcctagaaacgtaccttttaaatgatggatatcggactcattgacaaaatataactcaatgttcgcagctgggtcgtccttgactgcttgtaattctttcatgattcttttacctctagacattcttgatactttattctgttttataactttttataatgttttactctgcttggtgcttgtttctatcaaataacaataaaataattgtatgtgattctctccctttttattttgccttataatcgcttttatatgttcattcaacactgttcgaattgattatttactttctccttcctcttcttcttatgattattattattattgtacttatctcttttccttcacctttgccacacatcaatataatatcaaaacagaaataaaaaaaaaataaataaataaaacaattatttgaaaaattcatttttgacctttttttctttttcctttttctttccttcccccatctattattttcatgtcttttgatttttgctatatttgaaaaattggaattctcatcatcattattaaagcatgtgtatacccatccatatacacctatatatatatatatccatacatacatatatccctttgcaagtatccttatagacgtatatacttgaatgcatagtcacttttatttatggaatttcttttctttttttcttatgacttatgtctctgttaattcaccttccttgttgtcattattctgttcaaaaacatcgccttccccatcctcataatcatcttcttgatctaaatctttgaatacagattcttttggtatacgtttcatgatttctggtttgtcaaaaataggtcctatctttgatatccatctttgtctcttatctaataacgctttcaaacttgagttcgcagctttctgttgagccaactgggatgcagatatattactagtgtaattgccagaaccaccgttaccaccatcacccccgtgtaaatggccattaccaccactcgtcgacgctgaactgtggtgtctcttctttttctttggtgctctgattctcttcacatatgcttgatctatctgtttatctaaatcatcaagaatggataagtattcttgccatgctaatgccctttccaacaaaggcttcaatatttcttttcttctttgattacgccttgtcacgctctttagtgtagattgtaattctctaagttctgctgagatctcatcatcttctctacccgtaatccaatctggatcctcattgttaggactattttcatcctttggtaaattcatatatataccaacatatttcaattctcttttcaatctttcttcaaatgttggataatctaaattaatactattaatattccaatcagatgtatttggtaaagtattcgtagtgcccccacccaatgggatctccttcattacaataggtgaatattgattatttttagacaacaaattggaatgtagttcatccttaatactaatagcaggtgaagtctgcatgctcgaagacaaatcttccccatcctgtgattgagtcggtgtgtttatatcgtctgcaaactcagtctttactgtcgattcattgttctcttctcctctaatctcagagtccctttcatctcgtaaaattgcagataataatctcgacaatagaggaccacatgagatttcttcactttctaacatgctatcgttcagacttgatgcacttttctttggtaagatactggttaagtcttctgaaggtgcagttagtagatttcctgcagttttggaatcctcctttaaccaaactttcgtgtaaagtggtcctaatttagggattacaaaaggtgtgacattggggtcataatttttatctatttgtatgttagagggaataacatacttactctctaaaaatttgatgtcctcatcattaagtggtctcaaaaaattatcaacaaatgctaagaatgtgttatattggatttgattagatggcttggggcaggaaaaatctttatctggtataacccctggtaagtactcttttagatcgtttgttggataactagccacattgtatttcttctttaaatattcttcacctgtgctttccaatccttcctcggtgtaaagaccaagatctttagccgcctttggcaatgtttgagaaacaacaaattctgatttaggattctttaaccttgtatcacgttcaattgaatacggcgttgaaacactagattccagtgtaccaacatctattgacgaatgtttttcattttccaaagaaatattatcattagaagtgatatcagtggttgaaggtgtttgtatgtctttgttattgttggatgatggtaatgttaacaattctgatcgtatagtagtagcaatagtagtaacggtagaagaagacgaaaaagaagaagtagcttttgagttagcattataatcctttaatttaatcttctttgtatccggtccatcaagttgagtagaaccatgtgatatatctgcaaattcatctggtagatcccttttattatcattttcgactttatttgaaacattatctataggtgagactctttgcgataatctattattttgaccttgtgatattaaaatactctcctttacattatcatttggggtactagaatccgtattaacttctacagatttggaagaatcaagaggactattttgtttatttggtaagttttctttttgttctgaaatctcatctttgacagatttattctctatatctaatgattgctgtacagttggcgattttttattttcaccattttcttgtaatgtagaagtcatcatatcgtctgttatatttttcagtaattctagtttcttctgctgttctattttgttttgtaaattagaatcccttttgttactctctccctttcctgtgattttatttaaagctatatttctaatttggacctgtcgtattgcttccattgtatcgttatcctctttagttatctgagttaacagatcattcaatgcagttagtctgtccttcaaatttatcaaagtttgtttattatcaggtagtgtcttaacattggctccctttaacattccagtatctttatcgaatgacaaatttaatatagataatatagaagaaagtatactagtaggactattcaaatttgttacagtaaaatcagaaggtttagtggtattattctcattattactgctgccattttcactatttgtatcattattaactgcacttctgttattatttttgctattagtaccattgctactgagttttttcttatttggacttgtacttctacgggatgatggcatagaagaatttgatgtggaagcagaatgtctgtccatagacagggacatcattttagctttaggaccctttggtaatttcccccttctattttgtctcggcataattaaactcgggatcttatactaacttgaatatttatatttaaaaatacaggtttgacagttctaccaataacccaattgaatgaatgacccacaatttatgagatcacttgtccttacttaactagattgactaattctctaaagtgacaaatatattattttataaatagtgataatagataaaaaatattatattatatgtatgtaatataatttattggttttttttttactacttatattacttaatattgtttttttttcacttatccaggtaactttttggtataattttaataatcttgcaaaatggtatgaagatacctaattaacaattaaacaaggtatatatatatatatatctgtgtgtgtgtgtgtgtgtgtgtgtgtgtgtgtgtgtgtgtgtgtgtgtgtgtatgcttatcacaaaacgataagacaaaataattaaaatcaaatagtaaatagattgacagtctagatttcccttattttttttttacgtaactacttgcatacattgaccatgtcatctgtaaaaaaaaagtctaaattgtttattccacttgtttttttttttcgttcttcgcaatatttttttatttattgatctttttcttttttttattttcatcaacagaaagaggaaaaaaaaatagaacgtcaaaataaagtgtccctgcaagtttcgaacagcagaagaaaaaaaataaaaacaacaaaaaaaaagcgctagtacgattcgaaccgggaaatgttttgttgacacatatatagagttttgaagatttttcattaattggggaacagaagttgaggatttggattgttgaaggggagagaaaagaatgagaaagatcaaaagttgataaatacaatcaccatttttgcagtggatatagtcttgtaacaatatttatacaaataaggtcccagaggagcataaaaagaaaaaaatagatcacttgattttttactattgtcgatagagataagaactagatcggatcaataaaaatgttatcaacagtgagaagtggtttccaaatttattctcgcgtgatttttcaatcaagatctggtgtcagtttgatgtgtcgtaataatagtaccactactaataactctatttcttccaatttattcttatcaccaagccaatggaagggattgccaccgcagattattattcagttgcatgaagaaagaaagttcaaactgggtccaaattaccaaccaaatgtagatgaattagatgcattatacaccactggtgattttacgggcaaatctaaagctgaaattaaacaaatatatcaatcacattggtttcgaaatttgtcaaagaatggtaaaaatagaaaaagacaagttaaagtgaaaaaacatagtgtcaatgagttaaaatatgggttaagaccattccagttcgatgatttacctactcctgtacaagatgaattggaaactaaaggtgaagagagattttatcgtaggattgcagcttatgaacttccattgttagtcaagtacagacaagaatataagccggtggacacaaaggagaatccaataacttatagatacacgacttatttaggtgaagaacatccaaattctaagaaagtggtgttaagttgtcaaaccagtcaattgggtctcaatgaaaaacagttacacaagtttagactgctagcgagaacaagatacaattatgaaactgatgaatttaaaatgtctagtgaaagatttaatgaaccactacaaaatgcgcgctatttacatgatatcttacagaaattagtcaatgaagctaaagatttatcaaaggaaacgttcgaagatatcccattagataaaagacatgttatggcacaaaatttacgtaagaagaagggtgtcaaatcttttaaattccctgaagaatggaatagaccacaagatgcgccaaagaagaaagttaacattctaaaggaaattttcgaatgaaaattaataggcatatatacatttatacatacatatttacttatctattgtattacatttcttgtaaataatataaattcattgataagacatgtatgagaaaaagataatcgttaaattaaacagtttatatatatatatacatatatttaatgaaataccttattatgtttacaattatatatattatattatttagacaaaaaggaaaattgttacatatttaattaattaacgttgtttttgtttttgtttttgtttttattttttttattgttattagatacatatacggaataaccgaatagaataaggaaacatcattagatcatcatatatagactttgcatctgataaggtgcaaggacaaaaattgaagaaaagtatacatatctagagaaagataataagaaaaaaaaaaaagataaaaaaaacacactcacaaaaactctttagattgtttttattcataagatttatccttctttttatccttcttcttcttcttcttcttcttttcgctgctcataggatcatcttcacgttgtcttttagaatcatcgatggaagaatcctcttgagatgcaacagaaagatcaaaagggattggcaccggagcatggcttggaccgtccaatgagggtaaaatcccattcttcttattctccaaatattcggatttagccttttgatagttttccaattcaacattgtaagcttgtttccatttttccttctcagcatcacttagctctttccatttctttgaaatctcctgggtgatctcagtggatgataatggtggtaacccagccttagccctagcatcacgtaactcttgacgaacataagcagagtatgcaaagaagacagtcaatggtttcttaggagcatttggatcacgctccactttttttttggctggtttggtagcgggtacagatgtagacgagactatttctttgtcatcttcacttggattgattaattcattagtgatggaatggaattggttggtagcaccagttaaagtttgtaaagattcagttaaagtagtgaatgcatcaattttttcttcttcgtcttcgtcaatgttgttatagaattcaatgacagaagaagctgtttggttagcagctctagataattcgaataatgaggctaccaaggagtccttagcggcctttaattttgtggaggcatcgacgctagtcatttctttatttgaaaagctaactatatgttatgatctagtcagagggacagtagtgattacgcaaaagaagggaaaacaaaaaaaaggactgttttagaaatgaactacaattacagttactaccaattgacaacaaccacagaactaactagcaagctaacagactagctaagtaactaaccaacagttttgctcagtactgctactggcaggtagaaaagagttcaccaggtttctttaaccttccttctagcccagggaagaacaaaaagtggcttctaggcagagcacagttgtctacaactgtttggaaagaagaaagaagaaaaaggaaaactttgtcttgccaacggggcaaaactacgacgacgacgacaagaaagaaaaaacaaaaaaaaaaaggaaaataattgggtttttccccgatacatccgtacaccacatatgtgacgtataatgtgacagtagtattttttgtttagggtttgtccagggtttgcttagggcttgtcatgtattttctttttatcttctttgtagattcttctagattaactctcatgaatagcctgaccttctagctgtgtaccatttgtacgtacatacgtttgcattaaaatgactacatattagaaagctggtataagtcttgttcttttacaaatagagtctacttaatccaccaccattttctctctgtatattatgctaatacgagacgattgaatatcttttgtatagataatcggtccatatatattcggtaagtttaattactagcaatcttgttattttggtgtaacgaagccgcatatatatatatatatatttacttatttaataattaatagaatataaatagtaaaattagtagaaacaaacagataagaaaaaaaatgcaaagtgagtaaaaaaaaatcaaaaaaataaaaaaagacaaagacattaaaatatcatccacactgcaccacctaatagaactgccaatatgattgctgtaattatagcagcccccgctctatccccacctgtaatatttaatttgttctgtaaaacatttgtcgttgttgtgttcagacctgcattggcatctcctactgatgaaccaccggtatattgtgtgtacaatgcaggtctatcatggattaataaactctgtatcgcttccaaagcacacatctgttcaccaagaccataaacaccatcccatgccttcttttgccaatctaaaccacacgtatgcccatcagtaccaccagaacatgataatgcagcagcttctgcagtagtcttcatcaatgcatcgatggtgggtgcagtctcaggcactaacatacttgtaaatgataacattctggaaaagatactcttgaatgatctttgatcattgttgcagttcccactattctggcatgcactctcatacataataccatcctcgaagaaatattttactgcacctgctaacaatttatttacacggttttcccatactgtagatccatttgtggcattgtacataaaggccgcaccaccgaggacaactccatggttatatgaccattctatggtcgtaatatctgtacaattgccttcaatcgaggcaccatcataaacattaccattatcttggccatcaagaaccacaaaacccacagatgttaaccaatcaaagacggttgaagccacttctaaatatgtggtattggtagtatatctgcccaaccttgcagctaactggaacagacatccattagagatagtgtttttataattgtaaccggaattccacgtgaaaatttgccatctcaacccaccaccacaatgtgttttgtcccaacgagcccacatcgtattaaacacagcttgacttaacgctaaccagcctggcacgccttctttatctggtgctgtgaaattcctttccactgcatctataatagtaagtccccaaatacattgatcatcattcccttccaccatggtctggttcaatggcatatagtcataatctggcccagtttgagctataaaagcatccattaagatcgatttataagtatcattttgacaaagaaaccaattctccaacattccaccaaaggcttcacctgcttcccaccaatagtaaggtggttggaacatccctacagtaccaccgtacctagtccccaaataataatccatcataccttgttggatcaaggctgtagcgttgcaaatagaagctttgtctgtaacatttaaaatgatggcctgatttacatgaaataacgaaagaaataatattagaaacgctgacaatgatgaatacatggaatttacattcattaacatatagagatgtgtatgtgtatgtttatgtttatatgggtttaggtaatgtatttcaatttacagttattcagatatgtattaaaagttatcaataatgataatagtgatgatggtaataatgatagatatcgacaaaggatgtttgatgatatataaaaatatttcttgtttcacaaggttctgatataattattttatttatccctccatagttctataaataaatatctattttttttttttagagaatttgaattatgtacaaaaaaaaaaatctgttgaaaaatgacataacagggttatccctgacagtgaaagatacataaaaagaggcttttcattgatcgtattgtacgttgtgtgttcatcataggagcatcctctatctatatagttgccacaatgtcgctaacaacaatcacaaatgtaatctgatatatatatatatatatacactggcatctccatttatagtgtgtcgtgatggtagagtatgtaattttattctctctcttcttcttttgtttttttctgtttttttctgtttttttctatttttatctttttaactctctttttaattatttttatgttatctacttgtttgtttattttgattaatcccccattcctttgcagttaaacaatacttctctggcggtaatctaacaccccatgaccccattacttgtggtaatggcttcttatttctttcacttgccaactttaacaataactcctttggtgcagtgggtttaaattggtactgcgttctagatgcaatggctagccgtatgtcttctatagttaattggtctggtgccagattagaactgctgttacttgtattagtcgaagttgtattggatgtattagtgttagaagttgttattgttgttgtagcagtggcggtaacagtgcttgtggttgcagttgtggcagaattgctattagtattactactatttgttttagaatcagcatttgcgtcagtagtgttggaagtagtagtggcagcagtagcagtatctctgccgtcagtatttccagaggcattattatcagcagcaatactactcttcttattgctatctatatttgattctttattactagtagtattcacaggagtattatcctctactaaattattcattttgtattcattgtatatcatagcatcttttaatacacctttagtgtacctgtaagcaaaatccattaattgcaagggcactttttcttcatattgatgaatagcttgggatgccaacaaaagatgtagaagacgaacatcacgtggtgtatcaatatccatggatgtatccacatccatatccttattcatagattgctctgatgtggtcattatatttgaatgtgaatggtattaaacacttaagcagatttcgtgatgtagtttggttttttctaaatttcctcaatctccctaacctctagtatgtcagtgaatagacaaataagcacctagccgtttacgacggtcgctactatcgaactaaaaatgactgcatgttttctactcatccatcatcttttctttaaaccaattttacaatcttcttatttctttttttttttttttatttcttttccatcttttttcaattttaatcagaaaaagggaaaacaaacaaaaactccatcaaaaacacttagggctacagaactttttcaatacagccctaaaaatacactgtaggtcattaaaagaaaaagcggaaaaattatatatgaaataaattcgtatggaatgaccgatttggcaaaattatttctttttttctcatttaacaacgatttttttcttttcttttctttggaagaaaaagaacaaaaaagaaaaaaaaatccaaaagttctcggaggcaaaaaaaaaaacttgttaattaaggcttttgaactaaaggagtaagacacaattaaaaagcaagataatttactaatttacttcaaagacacacatatatatatatatatatgtatatgtatatgtatatgtatatatatatgtatatgtatatgtatggacagttttatccttttatcataaataacggtcaacttgtttaattaagggaaagcaaaatatagcaaaacacaaacaaaacaaaaagcataacaaaataaaaaatgtctgactgggattctcatacaattattggtcaaaaagttagaactggtggtggtggtccaagagtacaagttgccagaactgccggtcaaatcaatgctgccaaaagacaaggtttggttctatcggtagataagaaatacggtacagccaactccaaaggtgacccagaaggtcaaagattgacccgtgtggatcgtgaaactgatattgttaagccaaagaaattggatgctaatgtcggtaaaaccattgcccgtgtaagaaccgagaagaaaatgtctcaaaaggaactggctaccaagatcaatgaaaaaccaaccgtgattaacgattatgaatctgctagagctattccaaaccaacaagtgttggctaaattggaaagagccttgggtgttaaactaagaggtaaaaatattggtgaaccattattcaagaagaaataaatccccttttgcataggtaggtaatgttatatctatcgtagttttaatcaaaacaattttatgtttctttcttttttttatttttcacacttatatatgttatatatacctttttggtttactttaacgttgtcgtaatattgtcatggttttttaaacgatttcttttaatataatccacacacacatatatatatttatatgtgtgtatatagtcgttatttttttttatttttttttttttttacttgtttatttttactttacattattattatagttcgagaagaacctactttcaaatgccatcaatgcaaaccaatcattggcatcaaataagaacgtcttgccaatatattttacctcaacatacctttttgtgtagtagatgtactatttgtttcatttaatatgaggtttactatatggccacgtgagagatgagaaaatgggtgtgaggtatgggtttgttggatttagaccatctgttttcctcgaaggcttcttctttctgaaagtttcattttggatggaaaattttcttttcgaaacaacatcagaggttatggatgttagactggatattcaaagaagaggagagaagataggttgtcttaaacatttgttactggatagttgaatttattttgttagtcttttttttattttttcttttttttaggtctgggtacttccctattacttttccatctgattgcctccccatctcactgctcatccctcactgaactaattgattcataaaaccaaaacaatgtctcttctaccatttaaaacagactacttagaaaatgaagtcttttccatttcaggcaaagccttgaagttgactacaaaggaggatattcaaccaattttagaggatctattgaaattggataaagtcactaaaattgatgtctctggtaacacaatcagtactgaagcttctttagctctagctgaatgtataaaaaataatgaaaaaatatataaaaatgtagtcgaggttgattttgctgatttatacacttcaaggttggtagacgaagttgtaaaatctttagaatatttattgcctgcatttttaaagtgtcataacttgaaaattgtcaatttgtctgataatgcatttggtttaagaactattgattctttagaaaattatattgccaatgctgttcatttggaacatttaattctgtccaataatggtatgggtccatttgctggtgaaagaataggtaaagctcttttcaagctggcacaaaataaaaaacaagaaaagttaccattattgaaaactttcatctgtggtagaaatagattggagaatggatcttccctatacttggctttaggattaaagagtcatggtaaagaattacaaactattaaattgtaccaaaatggtattagaccaatcggtattatgacacttattgaatatgggttcaaatactgtcaaaatttagaaattttggatttacaagataacactttcaccatcgtagcgtccttgaaattagctgaatatttaccaatatggaaggatacccttgttgaattgaatttgaatgattgtttattaaaacctaagggttctaactctatcttaaaagtactaaattctcatgtcttccaaagtttaaacaaattgaaattggaatataacgaaatcgaacaagaatctgttgagaattacttgttgaaggctcttgaagatgaaaagttaccttctttgaaaaaattggaattgaatggtaatagactagacgaagattctgaagctgttgatcttttacaaggtatgtttgaagatatagaattagatgatttggaagaagttgacagtgaagatgaggaagaggaacgtgaagacgaagatgaaaatgaaaaattcgaagaaattgatattgaatccttggaaaaagaattatctgaattgtcagtagatcaattatcccaggaattgtctaacactaagatttgaatagacttgaaagtgcaaataaatatctatttgcaaaggaaaaataaaaaatggtgcagataaagcatacagacttatttaaatgaatgtgtgaagactaaggtatacatgttaatgctttttgtggtattaacccaagatatgtatatatatatattacaaataactacagaaaggtatagatttaaatgtatgcacgcatatatatgtaagtacgcggaactatttgcatgattcatatataaaattatacttatttcataataagtacatttttattacattcgtcatttttttatctaaagattatttttcctcgctaatatttccatcatcttcaaaatgattatcctccatcttagttaaatgtttagataatttcccatgcattttgaacatactaattttatcaccgaagatcggccgtaatttatcatcacatataatctctttcttattatctgggtcttgcaaattatgttctttaatatatgaccagatatctttcactacctgtgttctaggtctaggttgatctccaattatgtgcttcaattcatcactcaatcctaaatcttcccaacagataccacgtttcttagttccatcttctctaacagcaatatcatttgtacttgatcctttcttctttcgtttcttcgacttatttgatttagtaacttttctgtcacttgatttatgtttaccattgcttgtatttttatttattcttaatactttgtccttactagaaacctcatgtctcaattgttctatctctttatgtatattttcccattcatgtaacggtattagaactttgggatgatctgtaagttcattgaatctgttgataactaatttatttaattctttcctccttgaattcaaatcaatcccatataatgcctcaaggcactttctgatctttttaggacttacctcatcagggtttgatgtcgtgatcaatgcatcgatattttctaaaaacttgtttatattgatgtccatcttaaaagtatagctaacgtattataataaaaactattagaaaagggactggatttggtgtggtggataaaatctttctcactggtagtaatatctccaactgttaaatatctgtgttcgtatatcgctaacgtcaaaatagatacgttaaatactactaatgattttctgttaattgaccacttttgctagtgaataaatttttcaagtatgtatatatgtattttttgaacttccaaaatataacaattttgattgacagataataagaatatgcatccttacgttaaaaaacatatattgagctctatggaatgtttttacatgttaataaaaagatgatatgttaaaaatatataaactacggataccaaacaccaatagaataaagtcaaatccgtaaatgtgatgacatagtaattagattgtcataatgttgcttctaatgtacatagcagtgctttatagcatatacacatacacacatgtatatatatatatatacaatttcactgtacggtatacttttacatatctgtggaaaataaagtaaaggagtaggaaatgataaattaaatatatagtgattgtattaaactggttactattgaagctgtacaaacacaatgtaggtaatgacaaaaaattttattctgtccacaatatccttatcaacaatatcatagaatgtgaaggttagtttttgatcttttctttcattttctttttatacaccttcaattgctgtttcatataagatggaataaataaaaaaaagttaaatcatgttcaaattttattattccttaggttcttcttttgctgtctttcattctttctaattaaacgctttctttcttgtctacttaaagttcttggatctataagttcattcgcagtacccttaacatcatcatctacttctactaaccattggtcatcaagtttcttattgatacccttgtatccccatttgttaacccattcaccagtggcttcatcaaagacttttttaccttctttgactttagatttaatacccttcttagctgcaaatttttcccatttagttggttgtcttggcttaggtaggggtttttctcttggtaattcagtcactgggtcaggtaattgtaatagagtcatagaggatgatgcagagtctgtagtagttttgatcggtagagatagtaactgattgataagtaactgaacattgtcacgagataattctttaattatttcttcacgattgatattcgaagtatctaaggcgtctttatccaacacattggtgtcaaaaacggccaaattacctaaatcataagtaactggaatgggcttttcaacagtaaccggtaatgttttgtaatctttatcagtggacatagtagaaattgtcaataaactattttaaacagtcgtaattggaaaatataaatatatgtatattacgctttatgaaatcgtcttcaataatatgattcatttaactatgcttaagttaaatagctctcaaaaacacttcttgagataagatgcatcgccaatgtactatgtctcacagtctttttaagccaaaactaaaagaaggaaaaagaagctcatcgcaaactgaaattaaaaaaaaattttcagtcattatatacgattagatcatcttgaaaattatgtaggcaataaattagtaaaataatcctataattatttattataccgcattcaattaaactacttcagattatcatacatattcatataaatactgtcaagtgatctttagagttcaaataatcttcgcaatggtcttgatacactggtatcacatggaaattgccaattgtctctaactaacttcttgacataatgtctagaagccgaatattgctgcagaatatctgcatgtaagacagatgtattactagctgttgattgtatatctttttgtaaatatgaatgcccaccactcataatttcaaaaaaattcatcattaacttgttatagtttaatataattaattctattaattgataaaccaagcggataaagactggtaagtctctttcaattttattctgtaattgttcgtaatgcttgccaataacatgtcttttcacatcgtatacattggtttttttctctttaagatagataatgtaatctttttttaacgtcttcaaatctttcaaattatgtcgaatttgggaactggcctttaatagtttattcaatgggatcattatgccaacttcaaaatctgtcaattttaatattgttatctttttttttattttttttaattcttctaggtattcaggcgatataggaagaaataatctgttattttcttgattatttactaaaagtatgttattatcaaaaaaagtttcacatctttcgatatcaatccatttctgaagattgttaatgttgcggtctattaaagaaaaaaaattcatcttacaaaataaaattcgtaatttatttatattgttgaatatatttttaaatatgacaatattctctggtaaggtcattttgttcaaaaagttaatgttattatattctgtattatagttgggattttctataggattgaggagacccttgctttgttctaaagagttagagtaacaacacgatgtattggaaaaattattcatggaatgagtgtccttattacaatcattactattttgaatatcttgataagcattatgataactttcaataatttccataggagttaaactatagtcataattcttgttattcatcccattgtactcagatatttcattttctatatgacaaacaaattctttatagttatgcaatgactgattaagcgtttttattaaattatcagacagtagtgaaccaatgctaccaatttggagaagatcggataaaatgttaatccattcgtgtaccctttgcattggtcttcttaatattatttctaaatgagtgaactgacatcttgtcaaacagtactctatccatttttgaaataaagttggatatttttcttgtaattgtttatacagataaatctgttttctttctgttacaaaataattcaaatatgttgtctttattctatgaagatgttgttcaaatagatttccaatatcaaaagtatcatacattctttttaatgaatcaccatcctcgagtaacttatcccaaaaattgacatctatttcattttgtatattatccccaagtaagagtttattaaaagatgctacaaatattttgctaatagaagcgattgtatcaatattaccaaacaataatacttcatctgatgaattggggtcaaagagcttctttttaaattttggatgagtatgcagggcttttctgtagacacacgttgccatttgcattgtttcaatatattcaatttcagactcgtataactttcttattatttgataaaatgtcatttcatcgctttcgtcactaacagattcatgaagtgatgagtaactttctaaaatttctgttttacttgctctatttaattccttggtcatttctgagctacttgacgatatcgtttcatcacaaccattgatatttaatataggtgttgttttcttattttgtggtagagaagtccgattaattttacttaaatctaaactaaaaggttttttgtttgatatattatttatttgataatgacgattggaatctctattgcgatgtgattgcgagtaaaccctttgaaaggtgggtagtttattgtcgttgcaatggaaataatcattttcataatctctaattggggtcagggtattgcttaaaggaatattaagtgcttcgaataaattagaagttttaaacatcaggatataaagaagaaaaaaatggaagaagtttctattagattttttaaataagcattttgttgtcttaaactctgtctggaaattatcaaaaactagtgaaatatcaagtcatcttacaaacataaaacctaattgcaaaaaagaaaaatattttagagaaataagtacaatgatgttttgtttagtactcattagattggaaaatgctgatacatgctgaatatatagttttagaagttgatctttgctttatatttttttttgtatatagattacttttaatggtcaccataatcttttggcagctttggtttctattttgtttttactttgttttttttctaataaaaatgaaacatttaaaacaatccggaatcgtatgtaacagatttgtattatgtgagatggggcatgaaagaaatatgttcattttttgtttcatattctatcctatagagaaatctgaaaagactttacataaagatataaagtatacgttacaattcaattcgagaatattccaagccacctcttccaataaattctgagataatcttgaaacgatccttctgcccctctgaagtgttcaatatggtttctaataattctatatcttgtgtggtatttgtttgttcttctaatatcttattagatgatgctaattctaagatacatttagggcatttatatgacataccatcagatgcagagtcatcttcctcattcagacacctcttgtggaaaatatgaccacatttgaaatataaaaggggtagttctaaaggtaattcacacatataacatttttgatccttaatacttatttctatgggtctatctatatttagtaacttgtccaatcttgattttttttcatttaattcattttgataagattcgactaatttcgtattattctcaattactacctcttgtttttcaaaaaaatttatcaataaatcttgtataaggttaaatttaatcacatcagtgtctgacaaaatttcaataatttctgttaaagatagtatgttaccttctaaaattgggttgagcaacttttctttaagtacttcttcgccaccaattgtatgaagaatctcttcattagaagtgaaatatttaagtgcaatagggaatagttgtgattctttttcaatatgagacacgaagtagtcccaacattttaaaggcttctcagttagtatcattgtgttaaaaatctccaaaatatgaattttttcattctcaccactattgatatggacgtcattcatgtgagaaattaacaacattaaagaattatccacttcatcatttgaatcaagatcattttgtttcttcaaagaatcactttgttttaaaatattttctgcttttaatttccaatcagcatgtctagattcttcatcatttttacttaaataatagtagagatcatataatgttatcaaaatttcctgtaaatcttgtttgaaaccttcgaattgttgatacgtttctaagcatgcttccagaaatactacaaattggaatggtttgtcaatgaatgaactaaatattaaacttggttttggaggatgatatgtagtctccgtgttgtttctattggaaagtttatcgtcaactgctttgataaattgattagttgatttactttctagtgaaataccattattattattattattgttgttgttgttgttgttgttattcatataagataaaaatgttttataattataaaatattttcttcacatctgattcttttcttgttaaggtgactgtttcattcttgctaacttttggtttataattccctgtgaatatttcaattaataataaatttgtatcattaggtaaaaaggataataattgtcttgaaaattgacacatgattctaagtgtatcgtcgataggtaaagttttgataaaatttaatgcagattgaggttcctttaagtcttctagcaagatagacacagtcatgatagggtctttagaaaatttctgagccatttcatatgcttcaaccaataaattacattcacgtagcaattcaataactaagtccaaatcaaagagatcgttactagaatagaaaaattcttcatttgaaatatcattttgtataatctcttttgaatattcaccagatcgactaaaatgttgaataaagttatttagttgttcgatattgtttaatttaatcaaaatgattaaaagtaatgtaatctgatcggcagttgttttattattttccaataatgaccataaaaatattgacagaagataatttatgtcatttttatcgttgttactattattaatattattgttattattagtactattagtggtagtagtagcaggtgaactttccaaagaagagaactttgttaaagtttcattgatattaataactggcaaacatagagtatattcctttattgattcgaggtactgaccttgttcaaataagtacttggcgtatttttcatggatatggtataagttattacgactttccatataattctcattagcatcggtattgttatgaatatgatttagcataaattcgatagcgagtgggaaatcattttttgataatattacatcaataatttgagtaaaagatttctttgcaatctggtatagtataccactagcggaaagcaagtaaaaagcataatcagtgtcactgtgattattagtgttgtgcaccattgaactaccgagatagtctaatatcggttcttggattagactgttaaaggatacgatatggtttttgatatccaaaatgataaatctatgtatcgttttgtagctgtcactattaatgcaaggatattcttctactattaacaagatgtagtctatgtcaagtgaggagatcatatttattttaatgaatgtgtcattttcagtgttgttttggagaaatggcggcagtttgataatttctctttcatgattcagtctataagatactagattagaattatccttgtcgattatccaaaatttcgagtctcttggatcccaagccactgtgtttaaattcagagataaattgtcggccaatacaatgtttggttgaccattattgtcgcccctcgtggagaataacaagacttgtgtcaaagtggatgttaagagaagccattcgttcgttgatgggtccttgatcaaatttatcgacaggatagattctccagagaagatttttctttgcctggagcccttgtcgtgtgcgatatcgcctcgtatgagtattatgtcaccgtttaaataacctagagcaattatagacagatcgggtattatatcgaacgacgagatgggactgttatctctttgtgagggcactatgatctccgagtggaaagaaggtggggttgattttgtgtgatggatcagtttatttaatttatagaatcgaattaatgtaggtcggttggatgatatggatttggaagtcaaaacaaacataacccagtggatattattagttgtattatttttatttttagtggttgtgttagaggaaagagggtttctgttgttgttgttatctatgatacggatatgggagatgatataattttgttcattttgatccattaaattgaagatagacaacctaagtaaattttttaaatctattatttgtacggtagcatgatttgatgtggccatgataaggtaagaattattatctgtgccattattataatctggtgcaatagaaatagcagatagatttggatctgaatataaaggctggtcgttacctaggagaggatctttaatggggagagagtgataaaactggaattgtttccaagcaatggacattttttttttcttctttctagacgaagatgggattgtttgtgttactattatcaaatatgtatgacgtttgttagcaaaaagtgtttatttatctatgtatctatctatgcttctctctattcaataatacatatgcttgtaattctcttaattcgaccttattcttattatattatttatcattactgccacgtataagaaaagagaaaaaggaagaggaaaacgaatagagaaaaaaaataacttcatatagggttaagtatttttatgtacccattttccttaaggccttttctaagcacatgagggtttcaacttttttctttttccattgcacttttgaacaaaatggtgttcttttttttttttttataaccgataacccatacaccttccttgccaagactggttttatttttgtttcatcgccaacaaaataaaataaaaagaagttggagagaaacgttgagttcttccccctcccctactttaatccaataaaagaagatattttaaaagaaaagaaaaaaaaaaaaaaaagaacaattgaaaacaacctattttatatttttcttttgtccattctttgaatggaaagataataagaaagaaaaattgttgagaaaaagctaaaaggttaaaaagctaacagctaaaagaaaaggcaaaaattttgcagcgctggttgcagatacaaggataatatatgggggagagagagaggttattttttgtttcttttcttttctttgataatgagatcgcacgagaacagcgactgtgtcttctctattcccagttgtgaaacataggaggggaaaacccaacaagaccctcatcttctcgcacattcttgtgtcaacagcacactgcaacacacccatcgccccctcccctttttttgctgttttctgttttcttgtttttttgataacgcacacgttttcttgaatacactcaaccctaactttgtcggggatttttttgccagaaaaacacagggaatagatagtcaaagctctacaggaactgtgctttttccctttattgttgttactattgttattgatgttgttgatgtttttttgtttttttgtttttttgttgggctcaagaaatggcgggctggaaaaacaaagataataagaatattttattctgctacaactgtcaattaatactactactacaactactatcactactactattaccactactattaccactgctattattttgttttgttttgtattttgttctttgttttgtctttttgtttttaatatcatcacatcggtgtgcacatatacacataaagatgtatacatcttattctcatgtacatatgtaaccaaatctgtatgtttgtatatatgtgtgtctgtgtgcctgtataggagaatggagatgcagggacactctaagtatatatggtggttgttttttcccattatgttgtacagaacttcggatgtttatctgaattgttgcctgtccatttcctccttctgcttttagatattgtcttggtctcacgataactagtttcttgactaatcctcaataatatacatttacacaaaataatatatatatatatacttattcatttatctataaacatatatattcgtactggcttccatttctaagatcttatagaggaaaacttattctgcattcctacccataaccacaaacaaacatatacaacatcacaccaatattataaactcaaaaatgaaattctctgctgcttctgtctctgctgccgccgctttatttgcttctgttgcctctgctatgactaacgaacaagttcaagaaattaatgccatcgtagacgacattaagtctcatcaagctgaatatatcgctttggaaatgaatcctccagcaggtttcactttacctcctgctttaattcaattatatgcccaagttttaacttatactgatgattcttacactactttattcactactttggattttagtgccatcgaaaatactatcacacacttctcttggtactctgatagattattaccagctttagaatctgtaagaaaggaatacagtgccgaatctgcttctatttctgcctctgcttcttctgtttcttctgcttcttcatcttctgttgcctcctcttcctcttcttctgcttcctcctcttcctctcactctgcagcttcctcctcttcctcttcttcttctgcttcctcctcttcctctcgttctgcagcttcttcctcttcctctcactctgcagcttcttcctctcactctgcagcttcttcctcttcctctcaccctgccaatggtgctgaaaaggtctttattggtatgggtgctggtgttgctgctgtcgctgctttattattataagtcagcttggacactccgcatgttgctgttgaatcatactatattattacctttgttttaagaatctatctatctatatgtatttatgtatgtatgaatgaatgaatattgggaattatattcgttattaaatagattttattattacaattactactactgctactattattattactgttattattattaaatagatcacattgattctctcttatagacatatatgtaaccattcttttgaatttcatcttctgtgtccacttgaaccatcttttcatcattatacaacacccagggctggtcaatcgaatcacggtgaaattctacatagtgaccggattgtacagaatttcccttatggcacaccacatctagcaagttatatttaacattattcatcccttcgtgtccacaatgctcatctttttgttttcttattggttctgttgtatcgcttttgatatccgaattctcgacaccatctggatggctgaacacccattcaatactactactaatatcacctttgtttatcttcaacgcttttaaacagattgaatgttcaaaccccatctctgtcatctcttttgctttttcctcatacatactgtcatggtcactgttattattattcttattttttatgactaatgggtcgttgatatcagggtcttcaatgtgttcgaataaccattgcactgcaacctcaccatcaggtaaatttccggtataatacaacgcttttctacatgcatctttactgaaccccatttccattaattggagtaacacattttcacgggggataaactcggatgttgaatctgtttcttcctcctctggttcctctaagatagtttcatttggatcatgttttgtaacatatgagtttaaaaaaatagttgaatcatatcgaattggatcacttgtcttcttcacagtccaattggacctatcaatttgcattctcattacattcaggaccaacaagtcaggtccagaactcagtgacagttgtttaatacctttaactgtttccttacatgaaggacaatcaaattgaatgtcttctgcgttagcttcaaaatagtggtttaattgttcagtcagattaatgtctctaactgatggatcttcaggcaatgacacttggatactgttacttatctgttctgtatacttgactttcccacatttaatgcattttaatttgtcaacaagaataaattgagtcattttgttgacagatttgactcgatccattataaaggtaaaaaattccatcgcatcttgttgtctttgagattcaaactccttattaccctgagatatgcaccttttgaaagtagtcggtctgattccatttggatacatttcaggttccaacaccatagctctgtacaatttaatccattgacagcgcaaattggtcgagggatacattatatctcttggaaattcaacaccaccatattcctttatcaaagattgggcccattctctatcatggaataacaattgaagcacagaattcatgtaacaagaattacctaagttttgtaaacccaacccatatttactgccatgaggtaaaagaatcaagtcttttccttgagaatcagtcatacggaaatcccattgaagattttgctccacttgtagttctgtcaaagttttttctttggcttgatcaatattagataggtcgatgtggtataaattcaaaaggatatcatgtaattgattattatcggggaatctgacatcttcatcacaggaatagcaatacacatcatttgtagtggcacttaaagatcccaatttaacagcaagtgagtgcgtcctattgtcttcgtagtgagctaatgcatgagaatggccttcaataccaacctgtttcctgccacaaccaacgttaccacaatgtaagcatagccacaaattttgggtcagagaacagtcttcacattgaacctcatttaagatgttgatttgcaaagtttgattcattaaagagggttcaaactttctaatatgatcacagctgttcatagtgagttcccatgaatgagtctgatccatggtcgtttgagattttgcactcaagatacggttaataaaactaggtttttcatttggatcatcagaagacaacaccacattatacaaacccatctcatcttcgttagtacccattggatcatatttaatcacgttccaaagagtcgtaaatgtgtcatttttgctagcttcatgaaccactaatttcaatttcttgtttgcttgcgtggatggttgagttgctagttctttctcttgcttccatatttgtaaatatgtatcatgttgggaatcttggcaaataaaggcagcctgtctatgtagagtgacatgacgggggcatacggtttgaaaacattttaaacaaacatttaaagaatgtgtttttggcgtatcattcaatctgttcagacaggtttcaaaacagtaaatacattcatcttttgagataacagttggaatatcaccgagtgtagagacaatatcatccatttttctttcctttaaaatatataaattttctaagtgtttgataattttatttatatgtacactatgagtataaacttataggtgtgtatttttcacacttacaagcagttcttatttaaaaacttctctaatgaactaattagttgagaatattatacttaatcatctttatatctacacagtaaggcttaattcttttatatttacttcctcctaagaatcaaagaacgaaaaaaatggggacagaaagaaatgaaaaagaaataaggaacagaattagaactatataaaattaaagagcatatgtgataggatagattatatatatgtctataggagtatatatgtgtgtatggactgatgggtaagtgttagtaggtgtttgaacgtgaaatacagtaatgatatttattataggaagcagtatttaataacaccaaacaaactcaaactaaatatagaaagaaagaacaaatgtaggtagaaagcatcatcagaagtcataacatagaagggtaaatggacatagtacatccaatatagcttactaatcacaccatctatcttgtctaatattatatttggttttttacctgatttcatctttagttctttgttggttggaacccattccatagaagtagtaccaggtttaatcatcatttagtaaattttttttaaagaagaagaagaaaaaagaaaaagagtaaattatttatttatttttgtattaattgattatatttgggaatgatatgtatattctagtactttatatctttgatcacattccatgagataacaccctacttttttcgagaaccaatagacaaaaatgaaggtctaaacgatttgattcctttgttcttgtgttaatctagcagcacgacttacgtgagaatatagatatatagatatcgattaagtaggctagagctagtacagaacgctgaaaatcatctaccccaaataaaacataactcttcaactcattaagattgacagtaacaagaagctgagaacagcttttttttttattctttcttcgtgtgtttctaaaaaagattttacagaaaaaagaaataataaaaataaaaaacaaaaagaaacacaagagataagaaaaacattctaatattgctcaaaaaatgattaatccaggattctctgtaaacgacagtgatactacacagagagtgtgaaatataatacagtgatttgcattaagtatatctattgagtgtagatatgtaaggtcttgtttaattgaaattgcaattgtctttttatagagcatatgcatatgtatattaggtaaggatatgaataaatatgtataagttacctgattctataaagtttaaatacaaaaaatgtctcgagactacttcttgtttctatttccaatgttttattctaatgtatcttaattcattttattttatctttatgtattcataatgtatcttgatgtcggtgtctagattattcgtgtcaattagctgaatataatatcaattcttgtcattcttaaatagtgaaaaaaatgatcttcttttcgggttgactccattagaaaggctgctgctacttccagtagaattacctaaaagtgaatctctatgtaatctttcgatgtctagagattgacgtacactcgtaagtttacttctatttttggcacggttttctctatttaaaatgtcgtgtgtagcaactgaggataattgttgatgatgggccttggaaaaatgatttgtgtggtgatgggttctcccaataactgaactgctgttattggtactttgagggctgctacttactgttatctggctattgttgtttttgtttttgtttttatttagtggaccattgaatgacaaattcaaactttgtgttgaaaggttaatctcttgaagctctaggtctaaagaatatctatgtttttttgaatcaatggaaaattctcctctatctgtcctcaataaattcgagttgctactgtttactctcatcgattttcctctccgtatacctccatcattattgatttttaatttttcagacacctttttagagttatccatttgtttgttgtctctatctaccaaatttaagtttatgctctccgaagaagctatactgttatcttcattaacactttcagttgcgccaatatttattggattgtctaatacaccacttataaaactactctcttgagataggtttatctcatcaagactaaattgtaaaggtcttgaatttttattgcttggctttgaattatcaatgtgggaagtcacatttttatggctctgatttttttcatctttaccatttatggatagtccaaagctctcctttaccactggtaaaatgtcaattaaattttcctttgtttgactaacagtatttgtttgcaatttgcttggagtttcacttaatgaactatctgaacttgatgtatctattaatatagagcctatattacttttggtcggttgaatgttctcattgatacacggagatgagcgattagtaactatattttgggtatatggaaatgggtttgatgagctttttacattgttttctctatttagaggtaaagacggtgaagtgacttgaatagattttgtaggagcgtttatatttgagccaatgaaaaatgatgattgatggtttgtataaggtgttgtttgaggggattctaatttgtgcgaatattgtgttacaatcggtggtgggaatggcattttggtagattttgttgtttgtggtttcttaattgtttggttatattgactgtcaatgttaatattattattattgttattgttattattattgttattattattgttattgttattgttattattatgatgatgatgattgttattactattatttgtaatagtaggtatattggttgggagagtgcctatgctacttcccttattatcaagtatatttccttgatttgtaggcttagaaaatgacgctggttgatctgtgaagtcaggtgtttgaatggtttcaacgttatttattggcagcaaagatacagatggttgttgactaaaatttatggaggcattatgtgccatttggttgtttcctctttgcgctgtttgttgtatattaaatatattattatttactttagtaaaagcattagcagaagttgtaggattatcagaattggccttgccatcattactttgaattctccctgcattatacttttctgtgactatatttgggaacggattattagatttatgttgttttgagtaatttattcttttttcttgaactttaagcaatgtattctcaatagaaggatcttctatattaatagcatgtgcatattttcctggagaatgatgtgaagcaccattagcttgcatttttggaatagcggctacatcaatgttgctgttagttgtcgagcttatttttatctctccaaaaggattttgtgaggatgcagtaaaattgtaggtctcatttggatatgtgttattgttgctattcgaattatgagtttgaatatttatcttattttcactcatattctgtccttcatttgaggtagtggttgtacttgcacctacggtagtacttttattagaatcaactgttaagttgttgtttcttgaaggtttttcctcagatgttatagatttggcttgggtcatgcttaattgtgtaggcgcttccaaattattttttgcttcttgtattctaggcattacatcaaaatagtcgaggaacgggtcattaacaatttttgaattagcaaatgagttatcaacattaatatttgttgcctgagcaaatagttgttgttgtaacatttgtgattttttttgatagcgtacaaaattatcaaagtcatatgggccaatcccatatttatctggaataggtacatcgacgtttagaatagaacagataccatagacaacttggtatatgttaggtctcatatagggattttcacatagcataatcactattaaatttatcaattgcggtgaatatttgcacttcggaatatcgtatttggcatgcaagatagcaaattgacctgtatgttcaaatggagtggtgtaaaataatagtttataaagaaatactcctaaggcccaaatatcagatttttcatttatgggtaagtacctaaacagatcaatcatttctggggatctatactgtggagtagtgtgttgatatatgtcttgacctaatatcgctatatcttggtatgtagttgccactggtgaacatttagtagtagacccaaaatcacataatttaaaattattttctgagtctaccaaaacattttctattttaatatcacggtgtattaaggctggttccagataatgcaattgggaaatcccaatagatatgtcgtacattatttttaaaatttcctgttcagttaatttagttgctaaccgttgattaaggtaagttaatagggattcattaggacacaactccattaataacaggacttcgaatccaccaacgctacgatgatttctagcagcattagaatcatagtattgaactatattaggtttattgcttaataatttcataacttccacctcatttctcatttcttgtaatcctctttcatcttttactataactcttttcaaacatgctaagtcacccggtttcaaatgtggattgtgtgtattagtattgaactcatttagcaattcaacaaacttcactacatatatttgagcaaatccaccttctgcaagatattttacaatttcaactttatgatagccaacaacgacttgtagtcctgttgaatatttttccatatttatatttgaactatttttagaaatgggattattaaaagtagcaggctttgtgttatcattcaatgatgccatgttactgataatttttttagttatttttctgcttctaactttttccttcttaattatcttatactatttgtaattggaaagaaagtaattacccaagcagggtcgtttttataatattgtacaattgttctgctttaatagaagtatgactcaggtatactttggaatatataagtagcataaactgccgaactataaataagtaataaaggaagcctaagtgaaaaaaaaaaaaaataaaagagaagcggtaataattatttataatattataaattcaaaacccgattgatctctagtgcttaggcagtacagatcagtaattgttatgatgaactcaatatatgataaacacccctttaaacgatttgcttgccgaattattattatttctaatgttttatttttagatctaactgtttccgttgaaaaaatcaacggaagaatcatttgcctcctttcgggttttcagattactaatttccattagtaaaaaacaatctatgacaatttgtatatacaggtaatggcaaatagggtatagttttattggtaatagaatatgagcatggcttttgcaaatcattatttgtaaagatggtcaactaatggatatcattattggttacaattggttaaatatataattacatatgtgtatgtatacaaatgcatatatgtgcatgcgtgtttgtttaatatatatatatatacttatatttatatttgttttgtgataaattcgaaagaaaatggtatgagagataatggtaaaagactttttgtcttttcctattttatgttagaaagaatagtagttttcaatttctgtaattctgaatatttgtaaggaacccatacatattctataccagcattgtttttggatatatttatcatgttatgttcaacaaattctctcaacatagacctcaaagaaatatcattggatgcaataaattcttgagcacagagttgtgcaagatgttggaattcaagacctgaatttggtgaagaacgttttgtggaccgtattttatctccactatactctgattctaacttggaaagttgagtctcaacaagtaatttaaataattttttggaattaattgttagggattctaaaacatatttggcaccttctgcaccagctgatgtttcactcttacctattttcattacatcatagaaggaggattcaatagaatatggttcatagttggatacattgtggaagataaaattgtaattctgtgcttttttatcatcccataggattggtgcatagatatggtctgcggaggcaacaatggcaatttgtttaattgtagccaaagagctcaacatggtttgaaaggggtcttttctaacactaggaccatcgatgttatggattacaagaatcaacttaatatcactaggttgtgttttatagaattcaatcattttacttacttgtaaggtaacatgattcccccaatatttggtttcatttcttgctaatgcttctgggaacaaaatatcggtgatatctttaaatatatctctgtaactacaagtaggattgtatccattaatcactatacaaggaatgcctgtttgttcactatctttgttattaagagttttatcacttctcatgaacaattgtatctgtttcagcttgggagacaagtattcaatagcaaacttttctaaaaattcacgttttgagccaacaccgtaaaacagtaaagtaaaaccttgagtaatttcaaaccaatattgtgaaaacattttgaggtgtagttcatataatttctctcttttgttttttaaaaacattttattgaatagatttgatattaatccaaattcttctcttgtaacctcaggggccatggccaaggaattagtggattttccttttgctctactaggttttttttgatccaaataaccttcaaatgtatccaaaaaatcattggctttggtaaccagttgtcttggtttataatcagactgtggaagtggagctggaacaaaatctttatttaattttagagaaaaggtcctattgtaatctttatattgttgtaaattatctaagatcatttttttcaaaggtgatacaaagttgaaatcttttgaagcagtgtattcatttattttaggtttcttcctaggagtcattggttcaatcgtattatgttcaatcttatattttctgggacgacctcttttaagttttggtttctccacattattatcgattttcgatttcttttcattagtcttttttggcttaattatacttttcttgttcgaatcttcttctacttctacttcaggtataaattcctgttctgatgatgatgatgatgatgatgatgattcatcttcactactattatcgagctctaaccttctcgttgatctagttacaattcttctatgagatgttagtggtaaaatgttatctgttgacaattccagtttaataattttactctctttagtctttttctcggttagttttaaagattctttttttttgttgtttgacttttcttttacttttaatttttctttcacttttgatttcacttcaggtggtttcgtattctttctaggtcttcccggtcccctttttgttttcggggtatcggcaactgttgatttactgtttgatgtggtttttttcggattcttcgctttcttagtcgttgcagatttcttgtacttcttagtaactggacgttgttcatttgtgggactatctgcctcttgagacgcagactttagaacagagagtaaagatcttgggggcgtggttatagtagatagttccactctttctagagaattttttttcgaaggtgaagaatgtctactgttgcgggtgtttaatgaacggtacttacccggggaaatgctccgactcttggatagagaagacaatatatctatatgtgcgatgatatcatcatcattgaatgtttcttttttatcggaaaccatcgtaactttttgatctcaatacgagagcaaataggaaagtgtgaagtatataaaaattaatagcaaatcaatcttgatgattttctttttttagaagttataattacacttgaaatattaagataattgatgagtaatgatttttttttttaatgtagtttgtacttttctttgagattatagttattttgagagtgaataaaataaacacaaaatattaaaaaaaaaatttcaagtttgaaaaaaaaaaaaatgttatcaaaaaaaaagggcgatattattttttttttcttttcttctcttaattatggagtttcttccgtatttccataaaaggaaagtggagaatttttcacgatgtttttcctttttattttcgtttttttttttttttcaaaggacaaaaaaccgaaaaatcagaaaataaacaaataaacaatgactttttaattttaataacaatatcatatatgtagatttgaataaataaataaataaataaaacgacctaaaattaaccaatatatttacagttaatggtattattcagtatttgtattcaatttcattcaagcatgtttaaaatatttcaccaccttctcttctatcatacaacactttatcccatttaaaacttggcgaaaggcatttctttttcttatcataattcttgctaatgggataattatctataattttattgctattgaataatatgtcatttattgaaaaaaaatactgaagtctagcatgcatcgaattatcttcaggaacaagtaaagtagacatagaacagccttgtttttcatatacccagccaatatgataatctttaagacttctctttttatctttgcgattgtttgcaaacttcttgtttgcaccggaaaagataaactattgaattttttatgtttcttacttaagtttggttctaattgagatatactctattcctacatgacgtaactaaatcttgtattgaatggatttgagccttgtcaggttaattatattcttttcttccaatttttattcatgataagatatatgaagtaaaagccatattatatattatatgttgaatatatctacgttaagttgtaaagattttatttctttaaagttaactctttgtatatgttgatcatgtttcataattattttaaattgtatatccttatcctttttttttattttcgtatatgctttttggaaaagaaaagttttatttgttttaaactccgctttgttttgccaaaaagggtaaagatcttacatagaacttcgcacagaaatccaaaatgatgtattttaaaatttatgatttaacgtttgtttggtaaaaataattgcttcttaaggactattacttaaaatataggtgaatatacaatttaaaatattaaccatcgattatttgtgctattttaatgtttttttttttgctttcctaaagtgatgtcaaattggtcgtttttttgttagtatgcaaaattattaagtaacatttctttgggttcattttgaggaactaattttgcagtacaaccctcatatgcagtatcccacatattcatgtttaatgccttgactaatatgactgaattttttttttttttgacaattgtatgtagatttatatatgtatatatgtatgtgatgatattatactgctcttgttaacttcccacttctttttaactctaaagctttcttatatggtggatttgttggaagttgtacagggtctaatgactgacgaggctcctttgagttatcgccaggctcatcatgatatgtagcatcggagtcaatgctgtctagacccccacataacataaatggtgctactgtacggtcttcctcgtgccactctattaacttatcctctatagtcaatttggatacacttctgaaacaattttggaagaactcttcaatagattgattcatgtccagttttggttcccaattggcaggcggattgtatcctaggcatacaataaatgcttctaaagaagtacctctcgaagatcttggttttgcacatattacacggtcaaataaatatcctaattgagagtataacatatcgatatctctgccgcgaaaaatcttagccacgaaagtaccttgtggttttaatatacaggtggttaactgcaatgcactcatgattaattgttgttgtacatactcatccaaatcatggagaccagtgacatctggggcaccatctgaacaaacaaaatctgccttttcgttgccaaataattctagtatacgtgttaaggtttttggatgagtgatatctgcttgtaaagtagtcacgtttttaatgggtgacattggttgtaggtccacagcaatgatttttttattcgggttattgttattattttcttcaaacatcacccgagataaaacctgggaccatgaaccaggagcagcacataaatccacaaccctttctaaattatccaaaaaatgaaattcctcattcagttgtaataatttaaatgcagatctggctctataacctaattctttagcttttctataatataaatctcttttgtctttactacttttccccattatgttaaaaataaataagtgtagtaaaatattacacttgttaaatatttataaagatgtctgagagattgtagaacttccttcagctgtatcagtgagaagttgtgtaaaaatgtagttaagttatcaacattctttaaataaaaacaagatcgagaagtcctctgagtgtgatgcactatcgttattatttctttattttttctttgttctttctttttttttccaaacaaaaaaaaaatagaagaaaaaacttcgtaatataaaatcaatgaaaaaccactctcattattcagtacctaccagatatagacgcatatatcaaatacacacgtgtatatattatcatttgaggatacttactattttaataagcatgaataggacatgagaaagatggatcaactatacatgccccaatcttcttctagttcagctttagataaatcaatgttgtcgaatgtcttttgattgacgacatctcgacataacggacatgtagcatgtttggataaccataaagaaatgcattgtacatcaaaatagtgatggcaatgtggtaattccgccactaacgggtattcatcatcaccaaatttctcatagcatataggacacgactccttcaatgggatttcgcttcgaggtactcttggtaatgaatcaataaactcttgcgaacaccctttgaccttgttggaatctccaccatttaaccattcttcttgcaactctggcgacacaatcatggatgcaaacaactccaataaataactgttagattgggggtctctaagagtatcaaacaatgcttggaattgtgttctcatatttcttctgtcagtagactccatattattactgccgacattggtatcgtgttcatctgtataaatgttgtgttagtaataggttgtaaaaagaaaaacaattgtacggctatttccagccatttttaaccaatatataccatcatatgttgacatgactaagataacttatttgagtgcgataaacccacaccttcccttttagttctctattctttgcatttatcctaaaaaatattctatttcgtctagttgttgcctccctctacgttatcatttatagtttcattcttttatgtgtctctatcaaaaaaaaaaaataaaataaaataaaataaaagaatgccacgtgacctagaatatgtttcaaaacacaatcctttttgactaagaagagttcagctataatgcaaaggatgttgttactcttctagtttctttcctctttttcttttttttattcttttttccttctatatcatcagtcagttcattggaattattcttcctcttcctatgagactgttcaagtaattttaaatctgatgtcaccgtatttcgtagaattatactcagttttatatattctttcgtattgtttccaaatgtattctgtgtaaaattgtcttttacccatggcacaacatataggttgaaatagtcaactttcagtatacctctttgtactatattcccagatttatcagttcctgatataatatcaccatttgaaactaatacattaacaaatttttgtgctagttctaggcttttaaaatttattgaaccacaagtggccttatgatttattatcatagatagtggatggtcatctttccatttagagttatttaatagttgcgatattctatcagctatcttccactcagctaaagatgggtatatattatagatgaagaatcttgttgtctgaattttgctttcttcaagggattcgtttaaaggtaatctttctaataaatgttggatattgacatttgcaaatttattcaaatcaatctttgataattgttgcaaggaagcctttgatttattagttgtcaatttagacatttctctttgcaaagactccttcatttcttgcattaaaatatccaactgtgttttatcgttggtcatcatcgcagcactaccaattttcttattaccctttttcaatgcaagaaaccgtttcatcatctcatttgttgcttctttggtggtgatgttatagcccttaattaaagataacaactgatctcgttcttcaatagaaatatgccacaacatgtctagcatgcaacattgacaaacatttctttgtttggcacatgtggaacatataatagttttgattattgtatttgatcttttatctcttttgaaatggaataggtcaaatgctaaattacataacctacactctgcaccgtctgggactttaatcattctaatgtcttcctctggtccgagacattcgtcacatataataggactagctgacatagtgttaatggacttttttgtctatttttatggattgactttcttgcagagaaaaagattaaggtttattcgagtttttgccaacttgtacgctaaagaacgattagagtatcttcatttattgtgcctcttctaatctttcaaaaatctttctaaaaattgttcgggaagccagaaaattcaaacgcaactttaatacaaaaatgaaaatgaaaatgaaaattgaacattgccttaagatcttttcgaaattatctgcagaatacataaaaaacactttaagaataaatagaagattatcattacacgttatataaatatcttgtataagatcagcctaaaaatggttctataaataggtcatgcggtagaaaatgattatatgaatagttaaaaagaaagaaagaaagaaagaaaaaagttcattttcttcttcttctttgttgttttttcaaatgagttctataatgttgtagacaattatcatgtctggaaaacctctgattacaaccttcgtatggacaggtatagtttctttcccctgtatgaattctattgtgtcttgatagatgaccagatgtagtgaacgccattgagcatgttttacaacggaatttcctttgtcttgttgatggaatgggcacagccaaaggcatgtttttttgtgttggtgctgttgtagatgacactgtagtagctgactgtatccgttgatgtgatgaagaattcaaaggagtagtaggataatttatattacaaagtttcaagatcactggaccattttcagcagttactacttctttatttatgtaatttatcttgcgtcttctgaaaagaggaattttgcttgctatagtgattacctctggtgatttcatttcacaaggttctggtggtggggttagtgtgttagatctgattgttgtggacgacattgaaaaaatttttggagatcttggaggcgatggtaaatacgattgtgtacaacctggatcagtaataacattatttgtagttggttttatatattgagggtgagaagttggtaactgtgtcgtattagtgaaagtgatcgtagaggtggtagcagcaatgttaaaatcagtcctccttgtattagagaacaaatctctatctaattttgatattaaatctctttctattctgtgcgtgttattagggcataaaggtagaagtgtgttaaattttgtgaaaggagttggaatatttataagtaattgggaagacattgttttttttatcagtatggtaaataattagtaacacaaaaatagtatttagcccttatttgattgattcaagggtatatgtaaagtaaatttgcagtaaacagaatggatatttatagagattgaaatattttagtattttacccttcctatgtgtgtagctgattatagtatatgtatgtatgtatagatatacatgtgtttgtatttatatatattggtttgaagtgtaagagataagagttcctattaaccctgtatactattaataaagaattacacgatcgtaaagttaactttgatgaattctacaagcaaagtgccacatcaatatgaattataagaatccatcttgttgttttataaaatatccttgaggacgtactgttgttacaaacgaactatttcttacgtttttactatttcattattgtgaaagaagaaacatactcatcaatccaatattaagccgtttggattattgttgttgagaagaaaaaacaaaaactaacaatatcctaagttacagattgcagtgtggatagtcatcttaatgcgtctcgttaaataagaaataacaataagaagacactccatttttgcttaaattaatatttcattcaggcaaatttaaaaataaccactcattcttttcttgtttttttcctttgtaacttgatttgtttcgaatcaaggagatacaaataaaacgtgtttaggttatttaatgctatgacgtcgattttgattagaattaaacaggaattagtccctaatttgtaattcggttcaaggtgtatacgaggtttatgtagggttttacctcaatgtgtgaagttcaaattattgtttataaaaacatgtaacttatgatttaggtgtttcataaaaattttatctctcatggaaatgaaacagtttacatattttaggttttctctattttttggttaaaaaaggtcaaaaaaggaaacttctgtgcgttcatataagggttcgcaccactatgcagtttattttcaattaaatgtcaaaaacaaaattaggtcttgatttgtggttcttcaaagaaattatctaggtttttctattttttcctatttttgtgtcaattcgtataaatctttcgcttgtttccatcattattatttgattctaaacgacaaattaatttgaaaatgcacaaacgtttatgtcgaactttcaaaaaaaaaaaaaaaaaaaaaaaaaaaaaataataataataataataataatagcaaagagacgtatatgattttttgttttatacgaaaaatcatcagtcttaaaaactttcagaacactctaactttattcagaaaacatgttaaaatacagtaacatggtatggaatatgttacaatatatggttatacacacaagaataagaaaccttaagcagatcaagttatttctcacaagttaagtacattcagaagagcatacgatatgccttaacgatgggcttactttttactcattggtagagataataccatacagaaagtattaaaaaaccgtaaataaatcagtttatttagtaaaataagcactttatgccttatttttaatcggtgtattacctataaccctaatttttttttaaaaaaaatttataatgcaaacaattaaaccccctcactaacaagagtaagtaatattgcaaaatacagaaagttttataattaaaaaattgcttgtccaaattatattgagaaaaagttgtgtgttcacgaaaatgaaattgttcaatgccagggatcattgtaaaatcaattgttgagtttattttacatggggaagtattgtgttattgttgtaaacttattgttgtttagcaactttttaataaaaatacaataactaaagcttgttatttttacgagaggaattcaccataaatattttctctttgtacgactgaacatcacacgtgttctctttttcttttcttttttttttcatttttgccgtcttttctttttttacttaaaagaaagattgaaagtgtcttgttagaagcattggtaatattcgaagtcatctttggttaaattcttaaatggcataatacatgtgacatttttgattcaaaaatttcagttttcatattggtcggagaattaattagaggttattttgatttacgaggttaaaaataaaaactatttttttttattttattttaacgacaacttgggtgatatatttcattgttggtttgattgatatgtgtacgtgagtgggtttttatagatcggactgaggtttgagagatcatggcttagaacatcacttttttggagaagtttcactggtttctctataattttgtgaactttgtcgttttacaataaaaaagacaacgttttcgttttgataaatggggaagtcatttatagagattccaagaacaagaatgtaagagttgttttatgtaattggatgaatcatatcaattagtataagtataaatacccttacataagctttatatattactatttaataaccctgatgttgtattattacttcttcttgttgttttctttttcttgtatgatattaagagttacttcttagtatcattactaagatgtatttaaataagatgattacccctagcctatctctcaataatcaaaggcctcttaacaagatctgatataattgtcgctccctggaaatcctccaatcagattcaataccttatacaagccactgcgcacatggctgtaccaatcctccacccagacactcaggtgttaccctcggaattgcgtatctactggatttctagttaagttccttacaaagaatagactaggtccacattaaaaagtaaagtattcattattaataaaatatccctactaaaaattttgtttgtaaagcaaagagtcgagaagtatttagttgaaatatatggcgattaataatagtgagaaattttgataacttaaaaatatttcaggattaagttgggcagaaatatgttaatatagaaaggcataagagtaagttgaataaagtatgagtatggcttatttaatattttaccaagacacttgtattaatatagaaataaatgagtgttttttttaggtaatagtaatatttactgtaacttctttcaaatctttcaatggaccgataacattgaattggttgatatttaggatatgttaatttttaagaacagtacctttcttaatgtaatagatgatatttatgatttccttataaatcttataagtaaaaaagttattatttaatattccctgggaaaaaaaaaaaagagcagtaatttattacaaaagaaatctaaagtgttatcaaattagtagcatatgcttcatgtttatataacaggaaatactttggaaggttgaaatgtacatgagatagtataaaaattatcaaatggtacttgaatttgaactaagctgtgttatcaattataacacaaataaaaacaataaaagaaatggtaattaagaaatcaaggagaagacattatttgttcagtagttgaaattatatggttaggataaggaaaacaaaaggtaagaagacagattttgtctaaatcataaaagagtaaaagttgtaatggtattatgtgtattatgttatgtgtaagaatacaaaaagaaaatgaaagttatttgatatattttaatataaatccaaacatcgttccttagtgtttaactaacttattaaaattaaaaattgtcatctcaaaataatttttattcttaattattcaaacactaagttccaatcttagaaattttcattttttacctttaaattatcgatattgttgagaatttgcgcctgtaaaaattggataactagtatacgttctcaatgttatatctatatacatcgtgtacaaaattattattaagttcttaagtttttttatttatatatagtatatagatgatgatgtaaaaaagataaataagggaagaaacatgatatgaaaaaaatgttggttttatatattttcatatctggcacatctcgtctatgaatggaaccaatttatcgatatggcttgcttgcatttactgataaacaaacaatgcattttccacattctgatatcaatttatatttgctaaaatctaattggtacacctatctatttctagaatattcacttttagtaaataaaatattttaaaatcatgtttaatatctgtcaagttgaataattatttaaaaaacgttcctgatttaaatgtaaagttagatttcgtgtttttaattcgaatttctttatctagccttctcttttttctaaccaaaactgaaattgcccaaacttaatctaaaacataaattcaaaatgcgacaagtatactcgttaagtaaacaattatttacaaaaagttatgtaaatcactaaatatgtaacttaaggtgttaattattgttaaactatgactaaacacacattcactaatttaaattaaatttctaattaattaaaaaagttataaatgtttaaattaccaaaaaattgaatttaaaatgaaccacactgtatatttcatcttgtttatcacttatgtaaaaaaaatgcaattaaaccatataaaataatgttatagtacaattaatagcctgctataaatatgttataaaatatgatgtttatacttttccgctgttatacttgctaaaatcgagtgttcaagaataaataaataaatctatactaaagtgtagtatatttatatttcatttatcaataaatataaacaaaacagagtgaaatttttattcaatctacaaaaaagaaatgacaggtatgaatatttataaagccaacaattttttcatattatgttcttatacttgtagattatacccatacgcatcttatctattgttttaattttgaaaagttcattcgaaaattttttctcttttttcatcattgagatggagaatctctccttcaggagattttccagatctactatggctttagacacaccctaatgtgtttttcccttttcatcctgattgatacaaattcaagatctgtcattatacaaaacgaactgcttattcagtgaatatattcacgctgaaggatcatttacctaaaaaaaattacatataacctcaatcaactatccatttacatatatccatacataatatattattacaatcacacatacattattacctagaacaagaattttcttctaagaacatcatttttagatttaccagatttaaccttaaatttagttttgcttttaaaaaagttttaataatttcatagataaatatatatatagtctttagttcagcaaagccataaattcaaagcacagtattatcttgtgattatattaaataaatcctcattgcatgtgattacaatacaaaacaaagcaaacatacacataaagaaacaattgaatgacgcaataataaaatcttactttttcattaacatcacaaaataatttattatataatggtagtaccctatctaaaccagctatcttagtttacgcttctcttaactatatttttttaatatctgttaattcaatatcttaacctaaaaattacttcattttgacatatatttaatcaagtactacccttagttttttataattgtactttaataaaaaaaaaactgatgagcctcctaatttcctggaaaatgattataaaaatagtaaatacttgctttctgtttgtgaggttacaaacttatatcagaagtcgaaaataagtgcaattatagaattataaatttttgaaaacgtcacacaagctccattttttaatgaaattactaggatttttttagtattacagacatacaccactagtataactgacaataataaatcttttcaatacgaaggttgttgtctatataaccactctatctatatcaacatacaccaatgcatcaattttgttgaaaatattttatgaaaaaacaactccgagccaaagtcctttaaatatcagcatatatgtaccctatgaaaatgttgataaatattcttgtaaacacattaaatcctgcaaaagacactaatttatcacaagaatccaacattaaaaatagtattcaaatataacatttggatgtcacagttatgcatagtacaaactcttcagtcaatagcgatgttctcgtttttcagatttataaattctatatctatctatatattatatatttctcttaactactcatcctatacaatatagtttatatagtacattctatatgacatataaaaactggatatcactataaacaatcttgagaattccttagtcgacgacaacgttcttgtttttcttgtttttcttgtttatataactatgtttatctgtatatactagttacttctcgtgtagagaatggttcatatgtcatacataaacaactaatcaagctatatctatctattttagcgtctagaagagtatatctctcgtaattgggttttcacttattacattataccctcaaactgagcttctctgatattaacatctcaactactgcaaaatacaaaaaatgaaggatgcgaggttcgaactcgcgcggacaccgtccaacagatcttaagtctgccgccttagaccactcggccaaccctccttaaaatttacatccactgttgtggaatagaataattataaccatcaagattacataagatcctgaatgaatctagaaccaattagtgtattaataagccatacatgtgctacaacattagatgctgcataataaaaagattggattacataagatcttggcaaatctagaatttacctattgttttattaagtcccacgtgtattactaatcaccatgattagagaattgggatgcagttctaatccagtagtgcacctaaattaatataataaattttagggtttgaatcagtcaagtcattaatgtagtaatctgaataatcgatcgagctccagaaaacatataaaaggacaacgttttcaggagataaaagatcatcttccataatcgtttcttgtaaataatttatatattatgtataaacaaaatagaacaagcaagtaacaagtcaagtaacttcgaataagtacattagctcgatataagccgcttaatatataagaccgttttagtaattatactatcgactatagttgattactgtctcgattatttgaattactattaatattatttgcgcttccctggaatacacaaagaacttcaccacaccatactacaacatccactgttgtagatcaaccttgatattatgattataaaaatattgtgatgattgtcaagaaaagttctagtttggatttataggacttagggtttgttgataaatcccacatgattgttgaatactatgtaacaaaatgaaacattcatgaaacattaaatagctaattaaggagaaatgtatctacggtgacagtcgttacagaacctcaaataagaaactatcaacccatagttcatatataaaggaccagtatcttggtatctaaatttatatgtttggttgatttataaatatgtagctgttggaaaatgagagtttattactgtcattttcataagaattatttttaattagtttttctatatattatgtggtgtacggatgtacataatatcaggaaaacattttaattgtcaccaaatatgtctttcgaagatttgaaaagaaatgaaaaactttaaaagaaaacttaaagtaaataaaagaatgtatactgaatacactatataataaatatgtacaggtatttaatacaaaaacataacaagtatctataacttaatgatgtctatcattaccatggacgcagaaggctccaaattccaacatggtagcgtcgccgttgttgatgataacgatactgggaacgataaaatcatcaatgatcaaatcaatgacttgaaaaaagaaattgtacaagtcatatctaatacagatttgactgtaagtgaaaagacaaagaaaactaaagagttaggggaattgattgaggccctacaaaagattttaaaaattggaaaagacatggacaatgttcacatagaaaaaaatatagatgttgaacaaaagatagatcttattccaaagaatcaagaaataaataattataaaggttacatacttttatcaaagaaagatgaatatggtttttattatacttttaaaaatttagatggcaatattattaaatattactatgaaaatgataactataaatttaacaagaaattatctaaaattgaggaaattccaatctggttcagatcattatccagatatctaaaatcatggaactttgatgatgttacacaattgacaggtaaaatagaaatagataaaaatgaagaggaaataattagaaacattgttattaattctatgactgatgatatggaaaattttgacttggatgaaaaatcaggtattgaagctattttgtttattaaacagctactaggtgaagaattccctagaagagttaaggacagaatgtggaaagaactgattgttgatgagttctgtactgaaccagaaaggattaccaaggaatttatgtacatggtgaacttagagaaatggagccatgtaaaagatgatttctatagaataaatgataactttttaaaaacaaaaattgaagaatcattaacaaaaaacgtaaaacaagaaatgattaacaattttttaaccggtaaattaaaaggtgacttaaggcaattgaatgttgaacaatatataaaagcaattcgggattcaattagattgatgaatatagaatactgtgaatcaaaaaatttaacccgtattgaaaaaagaagatgtattaactgtaattcgtgtttacattatgccaaaaattgtagaaaaatcaataataacaatacttacttgaaaggaataaattataataagaaagaagacaaggaagagaagaagttacttaggcctggtgaaatcaatgaatcagaacactagatcaataaaagaaaaggtaaatgaactgaataccatcaagaaagaaatgaagaacatgaatactaacatagattccagagaaaagaatatgaaaatcgaaaagaacaaaaaacaacagactcgaaaagaatcaaacattaaagatatacataataagtacaatataaagataaaaaaaacatactcaaaaaataaaactaatgacaaagtagttattgatacagctgctggtatacatttggtacacaataaagactggttattaaacttttcatcattgataaaaggaccagaatattggggtgtaggggatgatagaaacccaatagaaatacttggagaagggatactaccaattaaaggaggtagaaataaaataattggtgttacagcatactattctccaaaacaagatgcaacaattttgtctgcagacaaactatatcaagaaactggcattaccttagacaaagggtatgaatcgctagtgaacaaagaaaatgagtttgatacgaaaaccttaaaattaggaaacaccatatgggtcgatacagataaaattatagctgtcaagatgactgataagataattagagcagttaaacctattaatccattagcgataaaacctaatatcacacttttagaagctcacttacgtttaaatcattttccagccagtggaataataaaatcaatagaaatgaacaattttgatgatgtgaaaatgataaatgataaaaaaaattctaaaaatatatggtgtgagatatgcgcttcaggtaaattacatcgacactttcattatactggttctatgaatcactacacttcacaaaaggaaccaggtgcttcttggagcttggatatatttggtcctgttgagcatgttaaagaaagatatttactcataatggtggatagtgtatcgagatttattattgcaacaacccatatcaagaaaaataaaaatgaaataggagaacaaattggatacaatataaattggattgaaaaacaattcgatgtaaaagttaaagagttaatcatggataggggtaaagagtttgacaatcacgtagttgaagaattagctcacgaaaacggtattaatattatatatacttctactgaagatcaccaagctaatggaagagctgaaagaggtataagaacaattattgaggacacaagaacattattgctacaatcaagacttcccttaaggttttggacatatgcagctaaagcttcagtgaatgtgagaaactgcgtatataacaaaaatgttggagaatcaccattaatgaaaatatcaaaacataaagtgaaaattaaattaagatcattcataccatttggtgccccagctatgatatgggattacagaagcagaaaaacagaagcaccaggaaaaagggctataacactatccaaggatccaaaaggttttggatattatttttatgtaccaaaagaaaaaagagtgataagtaccacaaattatatattaccagattatacaataaatcacagtttaaatgagaagaaaggatatgatattattggtacatttttacatgaggtcaaaaacaaaattggagatataaatgacattgattatgacgagaatgaaatagtaacattgttaccatcagattttgaaaatgaacatgataatctggtagatgttttacacgaagatgaaataagagttaaagaacatttactaaatgacatccaagaagaaattaacgatgtaacgccaattattgaacctagaagcatagaaaatattaaattagatgaattgtttgacgattttgaagttgaagaagaacatatcagcgaggaaacggaatcaagagagtcattaggagaagagctgattacttctcaaaatactgtagacacagaacaggatgaacaagatgaactgaatgtgaacaaatatgaaccagaaactaattataatgataataataaaaatactggtgtcgaacaatatccggaattaaacagcacatataaatctcaagaaaatgatcaagctagtttcatgcaagactcattggtaagtaaatggaaggatatattgaaaaataagattgaacaggaagaaattaaaacaaacattattgaagactcatttaaacatagtaaagcatatgccttggagaaacttaacgaaacacatacaacagaaaagaaattagaaactgataaacaactagtcttagagaatgacctcaatataacactacaggaacctgatactcttaatatagaacaagaagacacacaaaaagaaaaagataatgttgaacaacggaaagtatcagaaatagaattaagcaataatgaaggcgcagaaaatattttgaaacatgaagaaataacaacaatggatacaaacataacaggtcagataggacataatttaaagaaatcatcaaaatcattgagatcaactaataataaattacatcaagaaattaatgacaatgttaaaaattttataaaacggaagatagaaactgaacacaaaaaggaaaaggaaaagaacaatgaaaataacagtttacaacaagttctagaaagagaaaaggcactggaaagtaatgatattagtgttgctaagattgacgaagaacaagaaaagtattatgatgctaaagaatctgtttcactagtatctacattaccaaaagaggaagataatttaactaaatcaaccaatactacagactggacaaaaaaaaactttacttccttaaggaaacctaaaattaaagaattaaagaaaagattattagaaaacaacttcgaagaaaccaatcttgataatatccccaagattaatttaactaatattgataaaaaaataaagacttacaccctaagaagatttttaagaagaaaaagataattcgttatattactcctacagaaaaatgggaagaattcacacctgaatcacggggggaaagtgttccagaaagaaagattagagcattattttataaacaagctataactgagaatcaaaatttagaagaaaagattaaattcatagaagcgtataataaagaattacaaaatctagttaatatgaaagtaattgatttgaatattgccatagacaaaagtaaaatacaaaaggataaaatcgtaggaacaaattctatttttacgattaagagagatggaacttataaagccagaattgtttgtagaggcgatcaacaaacaagcagtagttataatgatattgaaacatccattttaagtcttgattcattgcgaattctattgattattgctaacaataagaagatgaaattaaagactttagatatcaaccatgcatttttatatgcaaccttaaatgaagagttgtatatacaacatccaaaaaatgcaagaaaggttactccattaagaaaggcattgtatggactaaaacaaagccctaaaagatggaatgaaaccttaaaagagtctatgaatggtatgggtctatatgataatatttactcacctggattattcgtttcaaaggatggtaatttaatgatagcagcatatgttgatgattgtataattgctgctagaacagatcaagaattagatgaatttataaatacattggaaaaacaattctcaataaaaatagttggtggaatgaaaaataatatgcttaatacagatattttgggaatggatttgaattatgattatgaaaaaggggagatagcattaagcatgactagctatataaagagattagaaaaggaacatccaatgatattaaatgataaattaaaagaagaaatgattccagatattgataagtttaaaataaatccaaaacaagataaattaattatgactaaagaggaatacaagaagaaagtaagatatttacaagagttaatcggtaaattaaattatattaggtctagaggaagaattgatatagaatgtgcagtaagtaaaatggctcgattagttttatatcctcataaaaaggtaattgagttaaccgaacaaatactaaaatatgtttataaaacacaagatacaaagactgtttttaaaagagaagaagtagaaaatatatcaaacatcacggtgatttcagatgcttcgctagcatctgaatttgatcttaaatcaagatgtggtgcattaatatggttaggaaacaattttttccatggattttcaaaaaaatcatcaattttatgtacatcatcagcagaagctgaattagatgccataaatcaggctgagaaaattgcattgctattaaaattgaaattagaaaagatgatggattttaaaaacataagaatatgtgtaattactgattccaaaccagcattggactggttgaaacaagattattttaaagcaagaaccaaatttttgggacttagaattgaaagattaaaagaaagaatattagattcagacttaagtctaagaaaaatcagtggaaaagaaaatcctgcagatccattaacaaaatccactactaataaagatataaataaattaagaatgattgtacaacatgaattaacacccaaagagttgcttccaatcactgtcctctggaatgctggtaatggaaatcattaagttatagtgaacaggaggaagttataagaaaaaccaattaaaggggcatgttggaaaatgagagtttattactgtcattttcataagaattatttttaattagtttttctatatattatgtggtgtacggatgtacataatatcaggaaaacattttaattgtcaccaaatatgtctttcgaagatttgaaaagaaatgaaaaactttaaaagaaaacttaaagtaaataaaagaatgtatactgaatacactatataataaatatgtacaggtatttaatacaaaaacataacaagtatctataacttaatgatgtctatcattaccatggacgcagaaggctccaaattccaacagtagcacattgtaaaatacaaaagaacaagcaataatcgtttaattctcctagatatatataacgttcttatatatttgttattgcccttactattcgttcaatagtactgttaaaaaaaaaaattggtcctaagtccaaactacaacaccaatggtgttattgcctctcggtagccaagttggtttaaggcgcaagactgtaatataagggtttgtttcctgagttatcttgagatcgggtgttcgactcacccccgggagatttttttgacagtccacattttagtgtgttattgtataatatccctgatattactgtttagggtttgtttggaaaaatgagggttgacgatatatttctaaactttccttttttcaaaattttacaaacatagataaaaacaggagtaaccaacataaatatatttataaggaagtaacggagaaagcaaggaacaaggaatcaaggattacataagtttagatatatagtatataagtgtatactattaggttatcatagattagggatatagatatatagatatataggaatattacatctagagatatagaaagagtctatatcttatatctatccaagtgaaatattattgagatttcaacaagattaactgttatcagaaacacataacctcagggttattacagttatgcaataccttgcaatacaaaatgtaaggaatatatacttttttgtctacagtctgtgaatacatttctttagtaattttttaatattatatctataggttttaaaataagccttcatcttattatcgccttaatgatttgtttttgtatcatcacatccacgtcaactgttctccaaaaataataaccaagagagttgtcacattcctcaggaactttaagattattccataaccaattagtttataaataaaatattccacctcctggataactgattaaaatttttccagatcttaagcgaatagcattatatgtattctgtgcaaaatataaatgaaattgttgcttcccaaaactatatttcaaaattttctaggtgatatctagaaataataaatttatacaatttacaaaaatactgactcggtagataaaatcttatttataaaacaaaaaaaaagttttctttaactttaacttttcaattgacatcattaaacgtacactaaatactgaatctatatttacctaaaactacaataattttgtaaagatggaattaacctatacaaaacagatataaacttataaaatgtcacgccttaaagataattatttataaaatagtaagaattttatacactaccattttcatattgaatctcttatttgtttaccttacttgcctttttttattagcttaaaagaaatatttcctgatagaaatgatacactaacttgtattacaacataaaatattatttttatcatgtctctcagctattgaattctgttgcctacactttcttgcagaaatatcaataaatctttctatttgtctatctattagatagttaacttgtttctaacgccttcttcttttctcttgattcccactgtaaaaagaaaataaaaaaaattttttttgttctaccatttagcaatgagctcgatcgaaattctaatagatctatttaagaatacgtacagacgcatagacacatagatatgtgcctttcgtacaacaagaaaacccttaataaatcaaacatacagaaaagctaagtagacaaattaccaatatatcaactcatgtccaatcctgacgatttagatgacggtctagtctacgatttcagtggacaagaagacaattcaatctctgaccttccaagtgataatgaagttggaaatatgaaagaatcagatactaaacttgacactactactagatctcgtaaacgtgataatgaattcagtgagaatgatgatcgtaatgttgaaaaattgtcaaaaagacaaaaaaaattacaaaactctaagttccgagaaaagaagaaagaaaagattgaatacgaaatcaatcaaaagaagttgataccaagaagtaatacagataccatatcagagtatttcattaagttgattcgttcaaagaatccaaatttaagtgcattggaattagataacctttatttaaagaaaaatgattttatctcaactgagccttttaaagacgaaagagatttgaacaatctagccaagtttataataaattattcgaaggctccaaatgtcattattttcagtatgtccaataagagaatagctgatgtgtttagacaattaggtggtagtaaaacctctgtaaaacttttcgctaaaaataaattagaccaggatataactactgtgacgaatatcttaaataacaatgatactaatactacagataagaatcaaagaaatggaaacttaaaagataaaaaacaaaaaaagaataaaaattccagcccaacacctgtctcctcctcttcaacaaatattaaatattttattgcaactccaactagaatggagaaaatccttgcctcaacagatgtttttttccaaggtaaagataaattggatataatattggatgcaagttatttagacaacaaaagcaattcgttaatttcatttgaaaatactatgacactttgcaaagtattaaagacaattatagacaataaaagttcagttaaaatacttctatactaaatatatttatctatataaataaaactataaatacagagatcttcatcatctatgatattttgccattattaataatttcccgctaattattataactaccatcattgttatcattattaattattttttcttatcgtttttttccattaattctttcatttattgaaatacaaaccggtgatgaatttattcttcgaatgataagacaactctatgaaagtcacagaactatctcttctactatcgttactattacgtatgtgaaaagatcagatataatgttatagcaaacaaaggatagcccaggactaagaaagtagtttatattaatagcaaaagtggggccattttacttacactttcggtcacttgttggatatgtcttctccacacaacatgatagatcaaacaaataatgaaaatgtacatccagtcgaacttagtgtatattctatattgtcaagtaatttagacggaatccaacaatctattaacgaattaagggaatctcaagctatcttaataattacaatgagaaagataagccaatcgttggatatggaggaaagattgttacatgatataaatgagtataaactttggtgtaaggaattgaatcatctggaaaaacgattgaaaaaattaactaaaagatattcaaaattagttcaaagaaaccaagcacttttagaattttccaataatataaaagataaatgaacgaatgaatagaaatcaaaataaaacagtctttctttctttcattctcactcccccctttttttatacttatatatatatatatacatatctttatattcataacagtttatttatttacttacttagttcatcatttatgtcattcaattcctgcttcttttgatttagatacactgtcaattcattgacttgttgttctatattatcaagatcttcaataaatgattgcaaattataatttgatgctctggctgaaaagttttgaccattaacatacttatcgtttctatagttcaacaacccttgtaattgctctctaatcaatttagcatcctcaagagttgtaattttattcatgtcaatgtttgcgtcaacattaggcaaactattagtattattgatagagtcattagtagtactagcaatagcagtattagtagaagtgtttggttcagatgttgtagttgattgattaatagtgcttcttttaacttgtgcttgctcagactttagatcatattgaattggctgcttattaaaaacaccttctaaattcttgggtacgtctgaaggtatcaatgatcctaagtcattacgttgtctcaagatgtgaataaaatatagagccggatctttatcaattgagtttaaattttttggattgaccaatttccaaaccttttccatatcacttgaactgatattgaagaatttatttttcaattgaagagacaactctgtaaaagttacagaaccatcatttgtactgtcattactattacattgaacaaatatttgattataatatttcatgtcttccggtgaaatataccaatctacttttggtggctccttttgtggtggcaaagattcattctctttttgctttctttgtatcctttctttaaccaatttgtatttacttccaggaatcaaccagtcaggtaattcatcagggactttatcaatattcttgtttaccatgtcaaacaacaatctcatacatataacaaattcctcaaaatccaaattgtcatcatcatcgatatcggcaaggaaccaaatcttgtttaatacagaagaatcttgttttgaattgtataaaattggcaaaacttgatcgtgtgttactttttgatctactggttttaaaccagaaaagatttgccaatatttcttaatctcaaattgttctaatttaggcattgttatagagttttttaatttccccttttgattccgtttcgtattagtgtgttagggaaatatacatccataggtatatatataggaatatcacacactagacaatcaacatatatagtatatctttatttgctaacctttcttttcgtacagactgccttcctttccttcctttatcaatttccaataattgaggtctttttaaaactctcgcaaaattttgtggctttccaatttttttacattttttttgacatacaacagttttccagactttaaagttaaaaagagagagagagaccacgaaaggacccatcgagaataaaacaaaagtgaaacacaatttatctatgccgttgagtatagtgtatttagcatagtaactttccaattatagtttgtattggatttgttttgtcgtgtcgtgcgtacgaggggatagatacaaggggtgaatatatctgattatgaagcgaagcaaatattggaatctagagtcctctgaagccagacatcaaaggtaccttcatctatttgcccaattagacataaaaaatacaggatacatagataaggccacatttcaaaatgcattagacttgcaaaaccatccattacgccaaaatgatctagttattgatcttttattcaaatcaatggatatcaatcatgatggatatattgatttagatgattttacatgttatgtcatccaggctgagctacaaatagctaatgggtttgataagattgacaatgaccatgacggttatatacgtagatctgaagtctccaaatacttgtctcgaatacaagaagctaatttaacagataataatattgttaccaataatagtactggtggcaaaatatctacgttaaataattttttaacctgggcttttaacccaagtcattggaagcttcataataatacagggagttcaaaaaacaatactaactctacggtaaatagtattaacgaacatcctgatcattatatttcctacaaccaatggagagatttcttaattttaatgccaagggaagaaggatcacgtttaaatacagcttacacatattattacttgtctaatgaagatttagatttatcatcggaaggtgatattactccgactagtgaattcattcgtgggtttagctatttccttgcaggtggaatttcgggtgtaatatctcgtacttgtacagcaccatttgatagaattaaagtgtttttaattgcaagaactgatttagcttccactttattaaattcaaagaaggatttactagtaaaaaaccctaaggctgatattaataagatcagatcacctataattaaagctatcacatctctctataaacaaggtggtattaaggcattttatgtagggaatggcttgaatgcattcaaagtgttccccgagtcatctatcaagtttggtacttttgaactagtaaaaagactcatttcaaagattgaaggcatcgaaaatccacaaaatctttcacaaatggccacatatttggctggggggatctctggtgtaatggcccaattctcaagttatccaattgatacattgaaattcagaattcaatgcgcacctttggataatccactacatggtaacaggttattaatagacacagcaaaacaaatgtacaaggaaggtggattatctatattctatcgtggtgtttctgtaggactgatggggatatttccatatgctgctttagatctaggaacttttactactttgaaaagatggtacattgaacgtcaagccaaacaaatgggagttccaagtgataagttaaaattagataacctggcagtgttaccaatcggtgcgtttagtggatccgttggtgctactgtagtatatcctataaatctattgagaacaagaatacaagcacaaggaacatttgctcatccgtatacttatgtggggtttattgattgctttaaacaaactgtagccagggaaggttatcaaggtctttataaaggactagtaccgaccttagcaaaagtaattcctgctgtatcaatcagctacttatgttatgaaaacttgaagacattggcatgtttaatctagaatgattactctttttgaatattctagcttttttttttttcctttctcttttttaatacttgtactattatttactattacacgtcttcgtcatcatcctcatcattattatttcctccctccccctaactgaatcgtttcatcacctatttatttactactgctactaactctgctatttattcttattaattcattaattttatcgctacctactgttgacaagtagactcatcatttatttttgtagtctgtacatatatttctaactcttgcatatatttctatccttacatacacatatctacatatactatttaaaaattcaatcaagaatacatacatctaaacaaccaaaactcccagaatcttattgtttgactttcaaggtaacttatcctatgtagtatcccttgtcaataatccttaatatacaccatggcttttattacatagaaataaagtctgaaagatcgaaaaaaaaattgatacgcaaagatatcatcttcctagtcacttacaagaacgattaatatatgttgttttttgttatgagtgaatacacatttgtgtagaatatactcaatggagaatagaactgtttctttattatacatggtttgataatccaagataagtgtttaaaattttggttgaaaagtggaagtgaggtgataaaagaaatgaccaatattaaagctattcaatctaatgatatacaaaggctaacatctggccaagtgattatagatttaacgactacaattaaggaattagtagacaatagtatcgacgcaaatgcatcacaaatagatataatatttaaaaattacggtgtagatggtatagaatgttccgataatggagatggtatagatccagaagactaccaaactttagctaagagacattatacctccaaaatttcaaccttcgaagatgtttacacggtaaatacattaggttttagaggggaagcattgtcttcactttgtagtatcagtaaagtagaagtaataactacacagaagacacctaaaggtacgaaattagaatttgattcgatgggcaatctattaagacaaagtataacatctagaaacaaaggaaccaccgtacaagtttctgaattgtttcaaaacttacctgtgagacgtaaagagtttttaaggacttctaaaagacaatttgcaaaatctgtatcattattacaaagctatgccatgatccaggatgaaatacgaattacagtgactaatattacatcaaccggtaagaaatcaattattttagctacaaaggtctcacaagataaatcacaccccattttacaaaatatcaagactatatttggttcatcgtgtggtaatatattggatgagattaaattaacattagatttaaaccagtttaaagaacaaataacgagacatttttcaagattgtatgagaatacagtggatattgcagatattgattatcagattaatgttaaaggttacatatccaaaaattcatttggttgtggaagaaacacaaaggatagacaatatatttatattaacagaagaccaattgaatatccaagtttattaaaatgttgtaatgaggtttatagatcatttaataacgttcaatacccatttgttttattaaattttgttgtaaatcctcaattaattgatattaatgtgacacccgacaaaaggttagttcttttacataacgaacagtatgtgattgatgtattcaaggaagaattaatgaaatattaccaaaaccaagatttacaactacctaaatcaaatatacatgtaaagaaagaaagattaaaagttgagaattccatgttaagtcaagagctatatattccattaattaaagatgatatcttagaaaaggagttatcatcaagtgatagcagcacattaaagagggatgacaatgacttaaaaaatgaagaaattcaagatgaagagaggacaataactttaaggccttcaaagagagccaaagtgatcgagtctgttattaatgtaacattagatgataatataagatcagacacaataatagaagaaaatacagaaaggccagacaataaaaatgggcaagaagaagaatgttttaataacgacaaagagggaatagagagaaataaaaaacaacaagataagagggaagaagcaacttcacataagcgcttttctactagaaatgcaatgaaacagtggggattagtcgataacaattctataaataagggtaaccaatcaaacaaatacgataaacacaacaacaataataatgatggtgctgatgatgacaacaaagacaatacgatattaaagatagatatcgatggcacagaaataaattataaagctaaatactcccaagaaacaaatgatatagaatttcccaaagatatagatactaatcacaatgacttatccagggatgagacccataattcattcttggacaatgttgaagaatatgtagaattagaatctatgccctcatcgccacaaaataatgatctaaatattaaagtatctagatcttttaccgaagattcatatgatcagactataatgaatcgatccctagctgttgagtctcattctaaatttttacataataacaaacaatacaaaatccatggattagaccatattttagagacttccattaatgttaacggtccaatacttcaatatgatcaagttgaatactttaacaaccttataaaaagaacaaatggatatcatactatgattaagcaagaagacgatattaaggatgacattgaatatatgaatctttcactcaacaagaaagaatttgccaaaatggagattgttggacagtttaatcttggattcattattgttgtaagaaagaatggtgaaaaccatgatttatttattgtagatcaacacgcaagtgatgaaaagtacaattttgaaactttgcaaaaagaaacagtaattgaatgtcaaagtttgattactccacagccattagaattaaacattattgaagaatttttaatccttgagaatttagatgttttcaaatctaatggttttaaactgaaagttgatgaggataatgaccctggccataagatatcgttattaagtgtgcctatatccaaacaaaccgtatttgatctaaatgattttaatgaattaatacaattaattaaagaaaatgatggatcgcataaaagtagtactggatcaacagtgataaaatgttcgaaaattcgatctatgtttgccatgagagcatgtagaatgagtataatgataggaaaacccttgacacgtaagactatgcaacgtgtcgtacacaatttgagtactttagataaaccttggaattgcccacatggtagacccacaatgagacatttattggaattaaaggattggaaatcttttacaaatgattatgaatattaaagattatatataagtgtacatttatatatatatatatggctatgaacgtatatacaagttataatgtttgtcattttccttattctattacacagcagttaatttttagtattattaacccaatctattcaatttatttaattttcttgctgtcatggcattattcttagttttctggcctctaacaggcaaatgatgctcatgtctaaaaccttgataagaaccaatctttttctttaatgcaatgttagcacgaattttactccttgcatcgtcctcaatagtcatattagacaattcattatttagattcaatatctgtgattcagataattgatgcattctcatccatggataaaaccctaatttggaacatatcttggtagcagtcgctaacccgataccatatatcttagaagctaaagctatattaatgacttgtttccccttgaatgctttccctaatacatgaaccaccattattgaatatacatgaatatataaggatggagatatttttcttgtttttcaccggacaatatataccttaagaatataaaacactatacctacagaacaactctgtttattaacaagtatgcatgtaaatatgtatcgtcttacacccttgaacatagcacccaacaaatccaccttgaatagttatattatcgtccttaacaggaggaacacactccaaaagaaaaaaaagtttagtttgtttcttgcaatcaaatcttgacattattttttctttttttgttcaactccttgaaatgttgaaaataaaaaaattcactgcgacgatgtatgggtgtgtagacagatcttgcaaataatacttctttctcaagctgatcgttagaatggtagagatgccaaccgaatatatctatttagatttatatctgtgtactaatatttctatatgtcaccgataataatatgttctttccttctttgtctttttgaatgatacggtgtatagagcaaagcaatgatggagaagaaaagaagcgaaggattttcttatctttctttctttcttttgtttttttaaattatatatcaatattgagtaaatcaatcagttgttcaatatctaatctctgaataaataaatttcttaacagacatagcatagtaataaagctggctaatccaataggcaccacacaaaagacaattatattgtatatatcaaatgctcgctttatctttgtccggttactagccagacatcgtatattttgtcttgtttcttcattatttagatcactatcatcctcttcacaatttatggtgtgtgatagcaagatatcttctgaatcatcttctactaggttctcttgattattgagaacattagagccgccattggtttgatctgcggaatatattaatgaattggttgtatcggtagggatcatgacagaagaagaagaagaagctaaagacaatgtgggaatacttggtttatttgaagtacttatagagtcatcaataagatgtgtgggaagataagaatgagaatgaggatgataataataacggtggttatgataaaaatggcgggtatttggtgggtgagatcttttaatataatcaaaattggacgtcaaataattttgccatataaacaaccctgtcaaaatacaacttatcaatatccaagtgtgtaaataataatctctctctggagacagagaattcaataaaaacaattgaattgtaataagaactaaagacatggaaaacattcttaatattactgccataacagaatatttcataatccaacgaaccattaaattatctagtatagcaaacgacaaatacaatgatacaaaacaccacagtgcacataatacatattctgatgcatgcccagtaatcaaattagataatattttgatttcgtttattttaagattgttgttaatattgctaagatcgatgttgttgttaaaaatatcttttacagatatcaaatatgctttccgtatagctttaaaccaatggaatccagctgggatcaaggatatatctctaaaaagggctaataacatatgctgttttgcagttagatgattcaatgatagcgtctttattgatgccatttgtttttcgtataaccttgaaatattattataatgtgattggaatacactatacctgtatggattattaatactactatcatcagtattaccattaagactactgtcgccattgttagaaccaccaccactactgtgattatctcttgatctaatcatattcgacaaattaatgcttgatctttactagccttcttaatctatagttctatactcttcgtctactttattgtatcttatattgttatgcttatatacatatattcgtgtttagattagcgttacaatatgcaatcattcaatctgtctttctttccctgtatgacaatcacaactttatctacttcttcttcttcttatccttgtgttttgtagcataacaaagattacctcaacagtatctccgccggaaattacgcaaatcccgaagacggtttacacggatcttgaaacccgccagcatgtgaccgaacaactgatacccttccaaactctcgaggaatgaaaatattaaaaaaaaaatgcggaaaagaagagaggcaagatctgtgctgggtctctttccattttaggtaatggtgccagcacaaaaattagccatgattaattacggagatgacgtaaaaagaatattttgaaaaactttatttaatatattgacaatactgcagtggcgtttttattccaaatcctttgtctttctcattagtctttttcacatgttccaatttaatatatctcaagcattaaacaattcttagttctttaactttgaccctccgccttcaaatttgtgaaagatagataaagaggtaaggagaaagagagagaaaaaaaacaaaaaggaaagaagtacacaagaatacgcacgcttacattttaccaaacaattcatttagttacttattgataccatgagtacgttaaatgacatatctttggttgaatacaacaattatcaaagaaataatattaccaatgcaaacatgagggattcccattacacaaataatagcaacaacaacagcaacactgatgataataatcatgacgatacttcaatatatatcatagaaccaataagagaagaagaagatttattacgacagtttactcaatgggataactatgtatcgaatagccatgggtctaatacacctaaatcatcaccacagctaagacatagacaaaagcacggacagtccttaattgaacagtataaagatagcacacataaagatacgtatcgaaccattaggaaatttccttctataagaagcaaagattttacatcaaaaagagaaatacatgataataataatagtaatagtaattataatcatggtgatgaaacaataaatataatagagggtaacaaatataaacgtaaaaataaaaaggaaaagaagacgggacttaaacttttatcacatttaatatttcaccgtgggtttcttaaaagatcaaatatcaaaaaagttagaactaaattgttatcaaataaaagagggcccaaatttagaaataaaaatgaattcaattcctatttaaactatattgatttgatatcgttagtaaatgacgagtataagaacgaatatgcatcaaatgaaaaggcattaatgaatgatatcagcaatataatatttccgcatagaaatagatatcggtcaaaccacttccatgaaccttcaatcctcccaaaaagtatcacattatacaaacccataaataataatcaaattgtggtaaacaaagtcttacctagagacgtttatttaaatagtgactattccaaacttttaaagaatcaatttactcaaatattgaatacttccaaattccataattcaacaatacgaaggaaattgtcaacaagaaagcaaacatcaaatacattaaataaagttcataatagacaagatttgaaaagatcaaaaactcttccgaataactatcaatacaacacctcaaaactcaatacgcatgataataacaattatgacgataaggatatcaaagaaacatggtcacaatatttgcaagctgttgttacacaaaggataagattaagactttcattacttaaaagtcaaccaccaccctctattatatcgtcaacaaactcatccatacattctggccctagtcaagaaagaatcaaaaaccattaaaaaattattttgtatatcaatcattatcactaaaagggaaacagtagaggggaagaagacggtggcacataaatttctatacatagatatatactgcatctttatgataaacttttaataatattcctaactacaatacataaactcatgtttttttttttgaactatctgttattcctatatatatatattatatattataaccctaaaaatgaaattcataaaagtataaaaattttcctttacaaaatagggttgagctcttcttttatatatttatttcttcaatatttgagggtttgtttgaaaaaaattaacttttcactccaacaaaatgaaaactttctttattgtaatgtaaagaatcctcgagaattcaatggaaaagacatcgaaatttctttctctcattaaaaaaaatagagatcaaaaaaaaaaaataaaaaagaaacaataaatataaaaaaaagaataaagagatgagtgagggcgagctcagaagttagtaaaaaatcttccctgttagaaatgtaaataactaataaagctcatcaaaacaaccgtacacttatttgccactcggagtattaatttttataatataaataaccacaaaaaaacacacataataataaatctgcctatttattctttgaattattttttttctcaaagaatttacagcaactacagtaaatcaataataaatataataatggtagcagatacgaaattgtatgatcttttgaatatttcaccggattctacatccgcagaaatcaaaaaatcatataggaaattagcattacaatatcatccagataagaataataattctaaagaatcaactttgttgtttcaaaagatccatttagcttataatattctaattgatccaaataaaagattatgttatgacaaatatggagatattaacttagctaaagacttcgaatctggttcaactcaggaagatgtaaattatgattatatgtccaacccagctaatttgttctcaaatttctttaataaacatcaacaacaacagcaccaaaactttccaaataataactcaaatccatattcttcctcttcgtcctcttccacatttatgttttcaaaccaaaatacaaatatatcaaataacaacaacatcaataataatctttataaaaatttaatgaaaggtcccaacatcatccatcatttgaaatgttctttatctgacttataccatgggaaaacatgcaaattaggtttacaacgtacaaaagcatgccctgaatgtgaaccgctgtataagccatgtattcattgtcaaggaaacggtactataaatggaattaataaaatcggaccattaagtcaaacatggtcacagacatgtctctcgtgtaatggatcaggtatatatatagatgcacagagacaatattcatgtaagacatgccatgggaatgcatttataaaggagagatttatctttaagattaaaattctacctggaatgtatcatgggcaaaccataagattaagcaatagtgcagacgaatttattgccgttacacaacaatcaaattttataaataatccctttaatcttagtgctcacatgaattcttcctcatcttgtactactactatgcaaagagtcgagcctggtgatgttataataaaaataatagagaccgaatcgcaactcaacaatagcagtagcaatcctgattataagatggacaataacaataataataacaaaaaaaagaaaaaagaagaagaatccataaagaatacaactccacaatttattcgttcgcatacgaaggatcatgaaaatttattattaaataattttccaatagatattgtgacatcattatgtggtggtaaaataatgataaacaaccatccaatggggaaattgattcaggtaaccattttacctggagaattattaaatccaacagggtacaagtgtgtcgaagggttgggtatgcctatttatgataaaacacaagaaatgaaggagaagaataatgatcttaataagaaaaataactgtggtgctgaagaagggtttaaagaggatatcagtttagatgagaatacaagtgatgtaaatcatttaaggaaaggaaacttatatattaaatttattgtgaatttcccagataaattagagtcacgtacaatcgaacaattgaaaactatattacaagaggacaaatttattcgcaaacagcaagaaattgaacaacataacatggactctaatctagatgattgtgttgaattagaagaacatgtgtttaataattttatggaagaaccatctgagaacgtttcaaatcaatttaaaagaaaatatgaagaagatgaggatgaagaacaattttctgattataacgtaaacgatgaagacgaagacgatagaaatggtgttaataatgaatatgttgatgagtgtggtgatttagatgaagatgaatatgaaggatattatcatcatcatcctagattcggaccaaatggagatcaagagacaggcgacgattcatataaaggaacaagacgttacaacaataacaatagaaatagaagtagaagcagtaattatagtagttataatagcagtgccagtaggagtaagaacagaaatagaaacagaaacaaaagacgtaaattcaatgcaagtaattttactggagacccattctttgatcaaatacaattccctaatcaagagaattgtcatgttatgtaagtgaatataaatcaggtatatgaataaatagacacataatagaaatatcaatttatacaagattttaatgctaatagatttcctttatatattctgtaccgttattaaaaccacttcatatgtaacctacttgcatatacattgtatatgatatataataactaagggatcaaaatagagtaaaacaaaaaaaacatataaaaaaacgatgcaaaaacgtttcgaaccgtagtctaaaatgaaaaaaaaaagcagaatgaaacatgaataaaaaaaagttttcgctgttttttttttttgcctggtggaagtcaaaggaaatttttgaagaagcttaaaaatttaatcgaaaaaagaaacgaaaaaaatgatgatcatcaaatgacacttcgaagagtcgaaccatatgaaacagaagaagaagaagggaaggaggaagaaaagagtgcaagtgaaagataagtgtaaatgaaggagggtgaaagagcacactaacaccttttagttgtacttttatataaacacgttctagcttttttaaatttgttaaatgaaacaccctaagagtgtttagtacctaatactattataatcatagtcacatatttatagacacagatattaagtgacattgttctttcatgtataattttgcatcacgaactgacgttagcttaaaaattatacgattccatttcttttttatttttttttaattgatatatattgcatcaattttcaataataatcatcacaataagtctgtctagattcttaataacattatgaacattgctattaaaagtcaagacatgcaacggcatcagaaaaaacaagaaaaacaagatataccgtccgtcaaccaactatctgatcctattcttaaatgcttaaaagtgtctcctaacttattcacaccagaaaaactaaatatattcgatacagttattttatatacaaccttgatcaattgttcacaacatattgaacaaggtgaaagattaaataatctatcatggagaattattaacaaagctttgttaaaggataaatctatcaataaatccaaaaagagagatggtgtcaaaaatttgtattatgtattgaatccagttcataataagaataacagtaatactagtaaaaataacactacaagtaatagcggtaacagtagtaatatctcaggtgaaaataacgttcccgacgtttttagcacaactataagtaatattaataaatcaactaatgaagaagatacaaatagtaaagagcagcccaaagcgaaaaaaacaactttaaacagtacttataattcatctagcggattatttacccttttagggcaaaggtaccaacaccatgaaaactttaggaccaacaatagtcaaactaataaagttaccaataaaattaataaaaacacttatttgcatcttaatgacaaccataaaatacgtaatgatattaatagtaatggaaaacatccaattattgttacaggcttcgacacaaatactttaatcaccaagactaaaactatcaaggctaattcaggtgataatgctactgatttttcaggtgataactctaaatattctaaatataataaaaaaggaaacgataacaataatgcaccaggtttaatgcgacagaaaaactcattatttacttacccttcatccaagtataataccggtaataataataatatcaacgacaacaataagaaaaaccaaaaccataattcaaatagaatattttttagtagtgaggatgaagatgaagatgaagatgactctgattggaatagtctttctagtgatgaagatgcatatgattatgatgactacagcgatgacgataatcatgagagtagccataaggctaacaaaaaagatgaatttggtcatgaagatgatgaagaggatgacgatcaatactataagcgacaatggaataaactagtgtttactaaacagagtaaattaagagccactgtatcacctagtgattcaattccatcatctggcgatagatccaacgagggtttaacgccatctacttcaaatgaacaaattgtgagaaaaagtttgttaagtggattattttctaatgaaaagagtcatcattcaaatcattcgactttatctccaaattccaagttatcatctgggcaaaattcttctacatcaagtttacatcaccatcatcatgtactgcctactacaagtaatatttcacacttgaataaagatactatcactgcagcaacaacagtgacagctcacggttcagtaacatcagctcaaggaccaatgaacgcaatagtaccgttagaagaaatgatgcaaagagaaagacgtggtagacaaatgaatagacaattaacaacaataccaacagaatcaagaaagatttctcgtagggacagttacaatagcctattttctgaagaagatgaagaagaggagaatgcctttaatggtaaagaaatatcaagagggagaagtaatattcataataacggtaaccatgataaacaatctaatgcaccgttgactgctcaaactattttaccaactgccctatccacacatatgtttttaccaaatagtgttattcaacagcgaagagcatctagaaacgggaatattgctgatgaaacacaacagaaaacaagatcaggtcaattcaaagatcaaattggacaaacgccgattacaagaagagaatctatagatattccaataaaaaatagaggtcatttgtttttaaaaacaaggatggagatttctgaagaagaaaaatacatacggagaaaacacctgggtaatgcaaattgaaataatttaggttctatatttttattcttgtatttgcttactttttaataaatttgttagtcactattttatttgatttttgaattaactgtattgtatttagtcacgataatcatatagatattagaagtatatataccctcatttacgaatgttaataagaccattattgatatgtctttattttttatcagacttcctctattatattactcatatgtcgatcaatattttaagtatctttctatttattgatcacatctactatctatgtcacatactaaatttctgtctttaataaaaaaagcataaagaaaagacaacaaagataaaaagaaaaattcaaagctcatcgccgaatttgaaaaaaattaaaaattttcagtagagatgaacatttgaatagatttttctcacatgtacaacatagattatactgctcgacatgtgtaggtccccagtataaggaaccaaagtattttattccaaaagaagtcagtctactacagtttacattagttaaagaaaatctttgattatcaaaccaaaacttttttttattaaataaaggtgaaatgttaagaagacaagctcgtgaaaggagagaatatttatatcgtaaagctcaacaattacaagaagcccaacttaatgaaaaacgtcaaattataaaacaagctttagaacaaggtaaacctttacctaaggatattgcagaggataccaaactacaagaagattaccgttatgatcaaactatcaatttagcgaatgaagagatcgatgatgaatatgcacacactagcgggatagttgaccctagaattattgtgaccacttctcgtgatccaagtacgagattgtcacagtttgcaaaagaaattaaattaatgttccctcaggcgaccagactgaaccgtggtaatttgatcatgtctaatcttgtcagtgcttgcattaaatctggtacaagtgatgtgattgttctacatgaacatagaggtgtgccgaccagcttaactatatcccactttcctcatggtcctactgcgttttttagtttacacaacgttgtattaaggcatgatatattgaaccgtggcaatgtgagtgaagttaatccgcatttaatatttgatggatttgaaactaaattaggtaaaagagtcgttacgatactaaaacatttatttgccccagggcctaaaaaggacagtgaaagagtaataacatttgctaataggggtgattttattagtgttagacaacatgtctatgtcagaaccagagatggggtagaactagcggaagtaggccctagatttgagatgagattatacgaactaagactaggtaccttggataacaaagatgctgatgttgaatggcaactaagaaaatatgttagaactgctgctagaaaggactatttatagcattctactcattcattttactttattagcatccatcttagagctcacaatatagagatacttaaaatataattatatatatacattagaataccaaatataattctacagtaattttaaaataaaaaatggtttgtaaattatgttaagaattgcatatgatttttttctattttattcattaattatttttttttttttggtttttacataaacgaatgttgtataatgtatataacaagtaaagtgatttatatatagttgtaaaaactgcataaaaataatctattagaggacatgccataaaccaggaaggaacatatatcaaaaattgtgatggaaaaaacagataaataaaacttaaagatgacaagattttattatcataaaatgcataatattttaaaaataaccatattttaagtaaatgtggtaaaatcaaaataaaataaaataaataaataatctagtattcaatctatattagtttttaagaagtaatctagaaatttatatcattttagaatatcagtgttgattttaagaataggcaaaaaaaaaaataaaaactaatactatacacagttattctttgaatattctattatttggacgataaaactttatctttaatcatatcaccaattttttccttttgtagttggaagttttctacaaggatagaatcattcaaattcatatgttctgtaggattattatcgaaatgttgttgtaatgttattactgaactggttttattcttggagtataaaaagtttgtagtttttagtaagaatgatgtatttttaatggaagaactagaagatgatcttaaattcttaatttttgttggtaggcatgatacagaaccattgacaccatgtcctggataataaccatcaactgcaatatcgtcattatcattagtctcgtttgctatacaaccatttttactcctttccttttcacattcgctgtcactttcactctcactttcacttgaggtaatatgaaattgagacatactttcaatcaacttagcctcttttaaccgtttcccagattgtaaatgagctatatccctgttaatagatttatttaaatgattctttatagataatggggtcaaatttcccgtagacactgggtcttgcaataagacagatgacgtgtgattgatattattagttaatgtatcttcaatcactgagctggaggggctaataggcgatttagagaaagatatatttccgttattaaaggagggctttcttgattgttgttgtggggataaacatactgatgaagatctaccaggtgcaaatggattaaaaaaacttgagttaatgctattggtattattaatactattgttaacctgttgtgatggcgatgtagacattttaaaattagatgcagacttagatatagtcaaagaaggtcttttacttggatttgatgcactatgtatctctttaattttttcatcagtcaacaggtcgttatatgaataaaaatttaatactttagatccattactttcagattctttattttgttgatctttaatgtcactgttgtgtgtttcgtctgtatttgtagaattactgggattattattgttctgagaatgatttgagagcttacctaaagccatgtctaatccaatcgtagatgaagatctggaatgaatgatgttgacatcagctatatcagtgacatcttctgccattagagaacagcttgcatccagtgctggagcgaccgaattttctagggttctcctcctatgatggtgaaacccatcatctactaagggtgagctaactgcaatattgctgttgaaactattaccattagaagatggaataaaacttgatgaataactgactgatttagacagtggagataataaaggattcgaaaaacttgcagaagaattcgtcctagagaggcgcctattggggataatagagataggtaatggaattactggcgtggaattatcattagtgctaaaggaatgagtagacgctatcgagtcgccagtcctttgtctagtcagagaaacactagaattacttctttgtttggacaagtcatgggcagtcaaagaagttaaagtcgtgttatttgaatatggcaacaggaaggggtcatcttggacatttctttcgaagattaaagatctatcactgatagttggagactggaaattttcagctgtaacgaaccccatctgctcagtcaagttttcaggaagattattgcattctacatcagtaatattaccagcatccttatgatttctatgatcttgtaacaaatccataacttaaactaattaaaacttttcttatagtattttatttctctatattatcttaatattttatgcgtatatacgtctatgcaatacttgtaataaaactagactgtttgatgcaattaatttaattaaataatattaacaacaaaacaaagagaaagaaacgattactgcttggcacttttagaatataatataaatttgctttcaacttatatcctattaatatatacacatatatatatatatatattaccaataattaggttaataagcagttatgtgaaattaagattgtgtgataaccaagcagagggtgtcaaatgacagccttgataagataaagagtcggagaatatctattaaaaggcagagagaaaattgagagtaaaaatagaagatatagaggcgaagccggagagatcgacagagaattgacaaaaacggtgcctgcaagatcgaaaatattctccccagaaaaaacaaaagaacggagaaattaacaaagggaaattcctaaaaagcaaaaaacaaaaaacaaaaaataaagaatacagaaatttctcgagcaattctgcaccgtgaagacacacaaacacacagagatatatacagaaatagaaataggctatctgactctctattcttatatatgttcgtgtctataactatatgtgtgtggtgagataagcagaggtaaataaataaataaatagatagatagataaaagaatcttgctgacataagtagaatattcgggtgaaaggaaatggaagatattagatatgacatttttatcattaaataactgcttgtatagggtcttttccgcaagaagcactcaaaagataggtagcagggccttgatattaaatcaattagtacacaataatttatcgtgtaaaccatactctcagcaagtgaatcacaatgtcaaaactcccacggttaaagattcgattcaagttgatacaacagtattagaattacaagaaagaaataaaaaaatcgaatttaattgcgataaatactatccatccatgaccgaacttcaaaaatatgatatgttcaaagtggaaagaattactttgtatgaatttagaaacaaatttggaaacatgacggatactgaattaaaagaattcaatgagtcagttcaattggtgtatggccgcattcgaaacattagatcaagtgggaaaaaaatttggtttcttgatattgatgaccattctcacatatcaggttacaaagaccaatcatcccaattgcaagttattgttaattttaaatcaataaatttgggaaacagcgaagtaacattatcccaattcgagtctcatatgagtcaattaagaaaaaatgattatattcagtgttttggtataccgaggttatcccaatcacgaaaccgtaatttatcattatctgttcaaatgctacctagaatagtatcacctattcaaagccctttaccgtcaggcttatcagaggtgcagaagagaaataacaatagagtcgttgactatcaagtgaacggtatttatccattaattcagagagctgtcatcatccgtctgataagaaacttttatcaggacatcaatgggtttgtcgaagtggaaacaccattattatcgtcaaaagccaatggtgcatctgctagaccatttaaagttcaatttaaagatggtcataatttagaattaaggattgctcccgaattatggttgaaaaggcttattatcagtgggatgcccaaaatattcgaaattgggaaaatgtttagaaatgaggggatcgatgcctcacataatccagaatttactatgttagaatcttatcaaacttatgctacaatggaagatctgattgagttagcagaatctctattcaaatatgtactttgtaacataacctgggagaatgacacaatcaaggagttaagaaatattttaagctctaataactggcgttttaaaagaatagaatttctgcctacactatctaaagaattaggtgtttgtatggacggtgtcaatttagaagattcgttagaattaattacgttgatacctgaagacgtaaagagaaaacttaatttgcaaggaaacatgtcctcaagtcaaatcttagataaattatcaagccactacttagaagatagaatttgcagtacaatacacccaacaataatctatcatcatcccttggcaatgtcacctttggccaaaagtgtgccatttaaaccaagaattactcaaaggtttgaaatgtttattaaggggaaggaatatattaatgcttatgaggaagagaattgtccacaggttcaattaaacaactttttgaaacaacaaaaggataagaataataagatgaacaacgtacacatttccactatatccagtggcattaaagataacattaataacgaatccatgcctgtagattataaatatgttgaagtcatgcgttcggggatgccaccaacaggcggtttggggctcggtgtagatagattgtgcatgttgttaatggaaaagccaagaattgaacaagtgttaccttttggatcgcttgacgatgtaaacagacagtagtaaaacaaataccttaaataaaacttgtaaatatttcctactaaatatccaataaatacatatcttgtcaatttacgaaaaagatagacacatttaaaatatcaatttggtatgggtcatcctgcccagttgatttatttatatcatttataaatcgatttgtgcagtgaaattaaataacttacgtaatattatacagttttcatttcattttgattttcaatatttacatatatatatatatatttacgtgttgaatttttcaacttgtggcttgtttttacgtattttctctttaattatgtatgctctacagataaaaaaaaaatcacacagttttaaaatatacatctggaggaggagaaagaggaggtgtatctcaataaccacgacaggataacaaatatccgtattgatatataaaaaattagttgtattacacacacatatatatattgcttgtttgtttgtttttttctattctccaatgctacctcctacagtcaaagaagcaatcgattcaatccattccacttcatatttctccaacatacctagcagattattagacactgatttaaatgatccgattataatgggagtagatgaagcaggccgtggccctgttttgggtcccatggtttatgcagtagcatattgtaggaaatcgtatcaagattctgtaatcatgccaaattattcatttgacgattcaaaaaaattaactgacccagtaagaagacaattattttctaagatgtatggggaatcatgtgaaatcgagcaaattggatatgctaccactgtaataacgccactagatatatccacaggtatgaatagattcccacccacgaagcaatataatctaaatgaacaagcccatgatgtcacaatggctttaatacaaggtgtacttgaccatggtgtcaaactatcgcatgtatatattgatacagtggggcctccatcaagttaccaaaagaaattacaagaaagatttcctaatatctcgtttactgtagagaaaaaggcagatacgttatattgtatggtcagtgtagcaagtgtcattgccaaagtgaccagagaccttctaattgaatctcttgggtacgaaaacattggttctgggtatccaggtgacccaaatacaaaaaaatggctaagagatatgcagagcccgttaatgggctggccacataatgtagttcgattttcatggcagactgctaaaactttgttagaagaaaatgcaaagaatggatcaggaataaatctacaatgggaagaggattttattaacaccaagaaattgttacagaagcaatgggaaagacaagctgagaaaagaaaacaactagagcatgaattgccaataactctagacaattggtatcactgaagtcagatgagtgtgtttccttgtattgcttcttaatcttttcctcttccctttccccccttctccttcaataaaacaacactgtaattccttcagaagttgttaaagaatctaatgaatagtagacaaaacatatataatgtatatatggatatgttatatgtatgcgtacatagattaccgtcttaggaaataattgaaatttccacattctttttcctattttggtaattggcttcatgtttttcagttttctccaattgagagcttttttttttttactttttttcttaccataaagatatcataagggataatactcaaacagttattctggcatggtgttgaatcaactttggtaaacatacaaacgtatattgtgtatatgtatgtgtatgtatttgtgcgtatctatagtgttgaactatctatttttaatctgaccattcaatgatgttagttaagtatattcgcctgtcgtgctgtgctaatataaagtgtcttttgaacaaacgaaataatcgttatacatattaatataagataatataaatatcgttttagctcagttaccttttggctttgttttgcacgtttacttatacataatgtcgtctgttctatcgagatcactattgtcacgtgtgtctagaagccaagtgttgttaaattcagccagatcccagcttaagttgcaattaagatgctacgcttcatacccagaacattcaatcatcaccatgcctgctttgtctccaaccatggctcatgggaacctggcagcttgggtcaagaaagaaggtgatcaattaaatgtaggggatgtcattgctgaggttgaaactgataaagctcaaatggattttgaatttcaagacgaaggttacttggctaaaattttggtacctgaaggtactaaagatgttccagtgaataaaccaattgctgtctttgtagaagacgaagcagacgtggcggctttcaaagatttcaaattagaagatgctactacgcagtctactgcctcagctgttggtattaaggattcatcaaccaacaataaacctgcaaagaatgaaacaactactgcaccaataactaatgccacttctgatacaaagaaatcagtatctacagcatctgactcgacttctacaacatcaagaatatttgcctcacctttggcaaaaaccatggctttggaagaaggtattgctttaaagaatgttgttggtactggtccacatggcaggattgttaaggcggatattgtaaagtatttggaaaaaatagctgctgcagaagcttccgtccctgagacctcagttaaacaacaaaagactactgcgtctgtgacttctactgctttttcttccacaacatctgtttccaatacatatgaagacattgaaattactcaaatgagaaggatcatagcagacagattattggaatctactaaatcaattccttcttatatagtgtcatctaatatttctgtcactaaattactaaaattgagagaatccttgaattctagtgctaatggtaagtataaattatcaatcaatgatatcttaatgaaagccataagtgtagctgcaaagagggttccagaagccaattctcaatggcttggtgatcaaggtattattagaatatataagaatgtggatatctctgtcgctgttgccacaccaacaggactgatcactcctattgttaagaatgctgagtctaagggtcttgctaccatctctgctgaagtgaaagatttagctaagagagccaaaatcaataaattactaccacaagaattccaaggtggtactatttgtatttctaacatgggaatgaacccagccgtgtctatgtttacttctattattaatccacctcaatcaaccatcttagctattgggacagtccaaagagttgctgtggaggatgcaggtgctgaacaaggttttacctttgacaatcaaattacaattactggtacctttgatcataggaccattgatggagctcgtgcaggtgacttcatgaaggaattgaaagctgttattgaaaatccgctagagctattgttatgaaatgatatcatacattgtttctgttatgattgtcactgttagctagttattatctaacagacgatgagaaaaatcacatattcttcttttaaaatttgtctagttactttattattcttatttataactgtatttattttgaatttatataatgtaatctcttcattatatcgtatcgttttctgtgatatttctagttttgatatttttagtgttgtgttttttttttctcatccaaaaattcctcagaaaaaaaaaagatagtagatatagaatttgaagtgtaaaggtttaaagcacaattatgttgtgaagtctttaaaagcattaaaaaaaactcacatttagtttataatgcatccaccttggaacttctaagatatacgtgcaattgaacgttcagataacgaacacatatatatcgacattcatttattcattattacacattttagttcttttaaaaaaaaaaaaaaaaaaaacaaaaaatgaagtttttagcatcctttattttaagtgacgaatctaaggaacgttttactaagatattcaatttaacacatacagtagctcactatggttggattccattcattttatatttaggatggtcacattctagtaatagaccaaacctattgaaccttttgtctccattaccaagtgtgtgagactcagtaagtaacaataaattcaaaaaaaaaaattcatgttaatatttatatatatgcatatgtttaaaactaaagtgtgataagaagataaagctaaagtattactgctaatgctaaggttatatcttttctgctgttgtttttttttttgtttttttcttttttgcttaacttgatcttaaatattcatgtgtatatctgtatatctgtatatctgtatatctgtatatctgtatatatactatattatgttttatcctttttatttttttaatacaacattaatatgatgaaggttatatcactactatatgtttgctctcttttagaaataaagagtcttgatagcgtaatattaaatataccctttgttcaatctagattgaatattatattaaaattattacttaattttttattatggtttatgctttaattttatttaacatattttgatcttgataactaaaattgaagaaagtacataaatgtttttttgtcagatttacatatgtatacgtatgtgaaataaaattaaaattaaaattagactttaattaatttagtaaccgaaggcagctaattgcttagcaacatcagattcggcagcagcggcgttggcggcagcaatcttcttgttgaaagccttcttcttggcgtagtattcggcagatctgacctttctcttttcttctaatttggcaacaacatcttcgtatttccaaccaacagaagaagataattgacctaaggtggtgtattttctaccttgcttcaatcttaaaactcttaaggcgtttggaacaacaactctcttcttcttgtcatatggtggtgggacaccttcaaagacctttaatctttctaaagcggccttaccacgagcagtcttgtgagcaatcatacctctgacagccttgtagaagattctggatggagctctgaagtggaatggacctctagtcttgttgaaaacagtagcctttcttaagtagtcatggtactttaatttgtttctgaagaattcaccagagatatttaattgttcagctctgacaacaacgatcttttgaccttctaataattgtttggcgacaatggaagctaaacgacctaataaatggcccttaccatcaatgacaacaactggttcaaaagtagacatgtttactcctcttggttggtctctacacctccttttctccgtaacttcaagaggatgctacgtaatagtgtaatgcagcacctagtattcaaatagtacaataggctagcccatatcaaataatttagcgatatcaataaatttttgaatatatctttggcacaatctagtctcactaactaatttcgttgcttaaaccccaatgtgaccgatcataacatcatcactagatccattctaaccaggccgctatcagtgggacctggcaccaccatcgcatggcccaccgtcggtaagtgtgtgttttcccctgtcttcacattcttgctggagaggtctaaattcacccaaccattagagaacagagccttggtagaggtaaaatggagaacgagagaaaagagcagggggtttacagggcaaaagggagatggaggcggcgaaacagcgaggcagcaagaggggagggggaaaggtactctgcttagtggaaacaaaacctttgctctgaacaaaagggcacacataggttcagctcttactactgtttgtctcccagacagaaggaacaagtgagacggttgtttgtctgttgattgtgatactaaagaagaatcagttcacttctcagccatcatgcttagctaggcagagaaatgtcatacatcttgtgtcattttgttccaggtcaatttaacgagggacagcaggggtgcgggaatgggcgaaaaatagctatgatgcattgattttattacaaaaaatggaaatgccaatgcacccaaaaaaaaataaaaaattaatctaacattcaagggtgtccggatgtaaccgtcttgtaaacaaagaaaaaaagaaaaaaaaagaatatctgttataactgtttgtttgtttttacataaaatattacatttcttcgccaaaacgatcatgaataatacatataacaatgaaacacgtatatatacatataggagacagccgttttacaaaaaaaaattattatattattattgtaaataatattctctatatctatatatatgtgttgaaataatacaaagaaaaaagtaattacgatgtatatgcaatggataaaaatatacttgaatatgcttcaaataagttgtgtagaataagttatcttatttttcaatatgtcttttaaaaaacatttgattgtaaataatatgtttctataactgtttttttttttaaaaaaaatatttagatgttgaacatttggttgtgttttgtttcgttttgtcttgtcctcgtgttttaattattcacggtacttagttttgcattttctgtatctaaaattagatttctgttttgattcactgaactttttataccagtcgaactagtttcagattttgtatctgtttctttgctagtggtcgcatctgtagctgcagatgtgacaatactttgtgatctcaaaggaaatgatgtagaagcccacaaagtgccatttattttactattctcagcaggttcattgttcttatcgaaatgactggtagagaaagtagcaacattcatatcattatcttcccgagaattgatggatgcaattgctggtgtattagtagtggagctaaactgtaataaattccatacaccaggcgatgacttgttactatttaacaattgttttttgctatttgctgaagttgctaaaccactttcagatgaaattgctggggtacaactaccattgttattagtagtgtcattatcatatttattattggatggagcttcactgtttcctgcagtattggaaacatccggggatttagtctcttgttggtttataacacttccacgttcaggagtatatgcctccatagcgctgatatggaatcccttgttgggagatcttaataacgtatcatatccacttgataaagtttgttcaagtttgtttcctgaaaaaggaatagttatattggacgccgataatttgtctgaattattagtaacagtgatatgatcgttgttgttattgttgctattgctgttgctattgctatttgtttccataacattttctttgttaacctgatttatattcattttctcagtccttgatatttcattattcttcatgtttgtgttttccattaaaccggtaggaatattaccagtatttgaagaactcttggaagaagtagtggatgtactgttagaatccattacaatctttggtaatatgatgttttgatctttggtctgtaaactttgattttcactatgattgttcgtatcattttcttgtgggaatttactgttttgactttggaaaagttcacgttcttgtccatgttgtggttgttgttgttgttggttctgatctacggaatttaacaatgtgttggatacattgtcattagggatttcattattcaaaggatatgtggcattatctgtttttgtagtattattattactatcattagcagtaaaagtaatttgaacagtgtgtaactgttggatattattgtttggattattaacattctggctattgttgttggtagctgattcagtaccactattgttattattattatcattagtggtagtattagtattaatattattaccttcaacattagtctggttaatattatttgttgatggggtctccccataggggtttagtaaatttccattttcgtcacgtcctggtaatctatgatatttagataaatgtatgtacaattgtctagaaactggtgaacttctttttatcttggacaaattgccagaataccatgcattcaaaaattccttttggaatttctcactgactctccatttcatacctttcccaggctcattaggtctccgaggaactttttcgaatgctttgttcaacgataagttatgtcgaattgagttctgccaaccacttttcgtgtatctataataggaataatttgtggaaataaatctatatatatcagataaagaaataacaccttctttgcttgataggatagcttgtgtgatcatagtggcgtatgagtaaggtggctttacagatctattttcatctagggataaatcagttgcgtaatccattgcatttgggaaaccgctctccaccagtgcagtaagtcttttcatgtttgcctctgatgaagactgtgatactacattataggaataatcaccattgactattgtggtggggccagagagttcattgtatggtacattattattcgtggtagcagatggaatgttgctgtggatcaacgtgttatattttaattgatgattattaaaatcaccggaactattgctgccattaaaattattatttggtacggtactatacatcttaaagattctaaattcttgacttgtagagttgttattattactgtcaataagttttgaagaattaatgtcgctattgtctgtgatattgtttcttgaattttggaaagctatagatgcattattattgccgttattgttattgttcaaaggattttgtaaagcttgctcaaatttcaatctttctctttcttgtattgcatacggtgaactttttatcaaatcattgatcaatagattatttgtactcggttgtagaccaaagattcttgtcaatttaggtattaaatagtctagtgcagactcggacaataaaggtatttgatctggtaaaatgaagatcatttgagtaccaccaatatctagaatggtaccggattgcaaagggatagtagttggaggactagacttagaaacactatgagggattctacggaaattgactttggcaccgtttcttccaataacatgtaactcccaataaccttgttgaatgttatatttaattatggcatgttttcttgataccaccttagctggacctagatcaatgtctactttatttggatcatgtgttagattgctatttaaatcgggtaagacatcgaatttggattctgtatctcttcctatgctgatctctaaatttttcacataataagtccaatctttaccagatattttagcatatgcctgaacttcggtggccatgttcctatcatttgagtaatgttttgagactattgtgggttcgttgggagaatctaacgaagatatgacgaaattgattaggctctcatgctgttctgctgtataacggtttgaatagtaaggattcgttgtcattgcccttataagacgcaattgaataaataaaaaaaaaaaaaaaaagacttaacaaaaaaatcaagttaaagggtagttttagacgattaatgaaagctatatacaaaaacccaaattactttattatttgtttgttagttttttgcgtttgtgaattcaattatagttaatcaactttcaatttttgtttttcttagtgaaaggtgttatctaactgaaataaacatatacattaatgcttataataagtagtagttccataagacaagtaaacaagtaaacaaagatagaataaaataaaataaacagtatattgattatctctaatcagttcccattacaagtgtttttttccacatcacatcaaatttcatcaaataaacaaacagaaatgtaaacaaaaacagtaaacaaaaaaaaaatggaactgcgggtttttttttccgggctattgtaaatatttagaaaaggaaagaaaactatatataaaaaaaaaaaaaaaaggatactgtgggtcaggtgaacatatattttttatatttcttttttccccagatatggtagcgccattaattgtccaattgaatcactccttttttcttttcttttcttttcttttttttttttcccagtcagtcgatgcctatagcctgtttcattcaaatcttcctacatgacccacacaggtgggattctttagatatacaagtatatatagctaccatcaagtacacaaatgttttttgttggtaggtgtttatgcaggaggagggggagccaacttgcaaagaatgaaagagatagttcttgtttctaaatacaatttaaaagaaaaaaaaaaaaaaaaaaaagaattttggatagtactagtagtcgtcacaaaagtgaattgtggttgacattagcttagcatattcaaaaaaaaatataaaggtatatatatatagttatattttagagtttgtgcaatcatatgctagtaaatagcggtagtggtgattgagattgctattgttattgtcgttgttttcttttttttttttgtttcaacaaaatatagccgccaagaagaatatggtagacagcattttgagagagaatgcaaaacgaacatatataactatatatatatgcaaagaaaagtaggtagaaatgacagatagctaatgggtaaaaaatggctaaatgaaggtaggttacagagtgttgagctaatgttttgttataaatagctatggcagtacgattatctatgtaatttttttaacaaacagtagtcaaacttattgattagactagatatgacatattcataacaactactatcgatatcaaaagtgataactcagttgacacatagtatacctagttgtaatagttgtcttacacaaaatacagttgtggttctctcgctctctctctctgtatgtgggtgtaagaagtaagcacaataaaacctcatttgcatgtagcatccgtgcaccacatgttttgtttgtttaatttctcgagttgaatcatttttgtttttctttttttccagtggtgggccgaaatcggtatttagtttaatttcattataaatcctttttttttttatttttatttttatgtgccttgaatattcatcactagaattaattactaatacaaaaaaaaataactgttttcgtattcatgtatcattgtgtactattgaataaaaaagaaaaacatatggtgcaaacaaagtaatacattaaaaaacttggtttgtctatttggttttttttttattgaaattgactttttttttccccaaattttgttcttttcttttgaaatacacctaaaagtgaataattaaatatattcaattaatcaggtttataaggcaattattggaattctattccttctctttttcttttattttcctttacttttttcattgttattgttcataaagcgtttctaaaatagttcccggcaaagtgacaatctatatgacatagaaatggctgatcatttagattccttacttgtgtctttcattgctaatgatactgttaataatgagaaagcaacagaaattgcaactagattggttaaattaatagtagaagaaaaaagcattaaattattggacattattataggtttaaaacaacagattacttccaatgattatacattaagaaagaaagctttaaattgtctttcttcagttttacacaatttatcaagggattatttatccaaaaatgaaattactgtgatattcaacttttatatgtcaaaattagatgatgaaaatttgatctctgagactttctctgggtttctatccttgcttagttacagtaatacttcgggtcaagatatagtttcctttctaaactttttgaaaaacgattatgttggcactaattatttagctgcaataaggtttgttccatttaggatattggaatttgtctatataaacaaattaaaagacaataaaattattaatgcaaagattacgactttatatatcgaaacttatattaatgttgcatcaggggaaaaggatccaagaaatttaatgagttctttcaaattaaactaccaaatcacgaccactttagatgaaactctggtgtttccgttaagacaacaattatttgatatccttttttcatatttcccaattacttttaaaccacctaagaacgacccatacaaaatatccaatagtgatttgaaactagctttaagaaaatctatctccgcaacagatatgtttgcagaagatgcgttctacaatctgatagacaagctgggtgcttcttcaccaagtgtaaagaatgatactttattaactattaatcaatgtattaagaattttaaaggtgaatctgttcaaaagatttctttggaactttggaaagctttaaagtttgaaattacgcatactttagatgatacagatataattgggaatggaaatggaaatggaagtggtaacaaaaagattgattggactttgacaggaacggtgacgactgatgaagaacattataaacagaataattatcaaactgcactgaatgttattagattaatgtccttaaaattagtggaatttgatatgtcaaaatttatcaactttatttctcatgtattcacggaattgacatcaaattatgtacattctaaggatttgaaacaaagttgtggtattctttctagtattggaagtgccaatgaagcagcctttaatattgttatagagagagctctgccattaattttaattaagagtactgaaatatctaagttgaagctattattaatgaatttatcattttttttagattcctatatgaatgtgtttggacaaactgagattgacaaagaagaagtcaataatgtgtcatctaataaattgtttgattataaagatgaaatattgatgattttaggtatggcattaactaataactctaaactagaggttactgtaagaactttagcagtgattcaattcactaaattagttaagatgaagggttacctatcttcggaagagatcgcattaattatccaatatttcactgaaactatcctaactgataataataaaaatatttattatgcatgtttggaaggtttaaaattaattagtgaattctatgaagaaactgtttatgacgtttcattaaaacaaatgttgaatctattgccattagaatataataatttgccattatttaataatagtgaatacgtggatatatcaacaattttaaagattatcctagacttcactacatcaagacataaattgattaaggaaagtattatttccttaacctctcagctattgaaggtagcaaaagcaaaagcagatcaatctgttgaatattgtttccttctattatcttctatatattctttatttgaaaataacattatattcattaaagaagaagaatcaataaaaataaaagatgctgttgaaccaatcttatttgatatcctggatctttctgatgatgttggaattgtggcagataatttcaatttcgacatgttatcaaacattttctattttgtaaatttgaagtcagatagagataaacataatgaggaattgatagcttataacactaaatttcaaggcaaatataaaatatttgggggtcatccaacacgttttgtgttaccatattgtaaaattctatcggcactggataaatcaattaattttaatgatgctaatgcaatgtttgaacaaactattgtttttctaaaaaatcgtaaatttaaggatggtttatcaaaattaggttacctggaattattaatggtcctaacaaataaatggttgattgatgatgatgtaaagaaaagtattaactggaatgataagtctgttattaatctggaaatcattacatggattgggaagggcctagtaatgaaaaattctgaattggcaccaaacatattaaataattttattgaattattaggtgatagccaagtcggtaacactgtttctcatttatttgagatttttgttattgatattaattctatgagaaaggttaaaggtatttcatggaataataatgttcgtttattatacaagcaaaagtttttcagcgatattttcaaagtactggttacattgtataaagagactgaaataatgtttatcaaatgtaattatttaacagcattatcttttacattaaaacacacaccttctacattagtcgaaccgtttatgaatgatttattacctatgttgttagaagctttagaaatggataatggggaagttaaaatttcatcattagagacattaaaagatgttacagagaagtttcaccaattgatcacagatcatattgatactctggtaccattattgttaaaattagtaattccaggtgataaaagtaatacagttttagttagattatttgcattacaattgttaaattctattacaaaagtagttcccttaaattattgtttgaattttaaagaacaggtgttagttggtactgtaatacctttatctgataagaagagagtggttcgtaaacagtgcgtcgatacaagacaagtgtattttgagttgggtcaagtgccatttgaataagcaattaggaaaacaagaaagtaatcacaaaaaaattaaccctatttgagtattattaatcgatgatgtaaatggatgtatgaaatctaatagaaaaaaataattccactaagctattacagggtcaactgtttaatatattatatcgtaggttgtatatgctattaatggtaatatctatatctatataaagatatagtagaacgaaggaatgatttatatatatagtacaaatggaatatgcattatagaaggtattgtgttttttttatttttcaatcataatcattataatcttcctccaaatcttcctcacttgaagattcttcttcatcacttagaccaacaggagccaatccgggtgttaatccaggatatctatgatcgaccacagccttcttactagatggtttaatctcttctttaaattgttttactttagatcttctcttcttactacgtagtttctttttattgtcattcgaaagtataaattcttgtagctcatgtaattcctgtttttgttcttcatcaatatccagagatttcactttagtaacgttatgcttaattaatttgtctaagtattgtttctctctagtcgttaacatatccctttgtctatgagattctaagatttgtagtttggcatttctttccgattgttctaaagcaagtcttctatccttgactttcgcttttgctatttgtttttgtttcttcttaatcttcaaggtatctttttgcttcaacaacactctttgtttcaaatttgcatcgatcaattgcgccttagaacccttcaagttattttttttggattttcgactaactttaacttttggagatcctggtaaaattttcgcaagcaaagaattcactgcatggttagcttgtaattgagtagcagtcaacctagccatcttaattcgtgtagaggaaaaaaatacttttacttttataaatactctttaaattaataataatgataataatatatgctgtatttattgcatattatgtttgaaaagtgccaaaaagatgtaattacgagaatggtaaatttgatgcacaaacttcttcatcttaatgataagacttcggctcctcttgtactgtagcgttagcaagaatttggtagtgtaaccttttttatttaagaagatcatcgcatcaaaagaaaaaaaaaattaaaaaaaaaattttttttaatttttttttttaattaagattaccctcatggaacgcaaatcttttttatttttgacaacgacgacagaaaattttttcctgataagattcttcattgaaaagtatataaatagatgttaacagtcttttagaacccttctgcttagagaagtctttgctgaggtttgggcgttttcgaccttcagtttgtgagcttttcgagtttattttttcaatcttcttttttcttatctccttccttatcgtgcagacctcattctactgactagaccgacaaaaaactgcagcaagatgaagcatattcaaactgaacaaaccatttccattccacaaggtgttactgtcgccatcaagtctcgtgttgttaaggttactggtccaagaggtactttaaccaagtccctaaagcatattgatgttactttcaccaaggtttctgctaacatcatcaaagtcactgttcacaatggtgacagaaagcatgttgctgctttaagaactgtcaaatcattggttgataacatgattactggtgtcactaaaggttacaagtacaagatgagatacgtttatgcgcatttcccaatcaatgtcaatgttattgaaaaagatggtgctaaatttgtcgaaattagaaacttcttaggtgataagaaggttagattggttccagttagagaaggtgttactattgaattctctactacccaaaaggatgaaatcatcttatctggtaattctgttgaaaatgtttctcaaaatgccgctgacatccaacaaatctgtagagtcagaaacaaggatattcgtaagttcttggatggtatttacgtttcttctaagggtgttattgaagaagaaatctaagctggttgaataggtttggtttaatttctttttttattttaatttggttcattttaatttttagaaagttttggtatccatgcttatttcgttggttctgatctttctactattaattacttattgtatttaatatactgaggtactgaatgtatacgtatatgtaatattgtatatataggagacatatctctgtatgagtgggtgatttgttcattcatctcattgaggtgttctctgtttgggtgatgtccttcgaaaatttgtaagatttgtgaagaaattcatagatcttttgtggggaacgttgctagtgctcaattcaatacagagccattgtacgttcgccaagtataatattgaattttttttcaaatatctgatgtgtttggctttttttcttttagcattttgtgtggagtctgggtgggttttgtttaggatctgtgtctacctggtctgcctttctgtgtattggatagttgaagagcattgtattttttgggccgtatgtctttgtaattgcgtacattaataattggtgtcaaatctgattttatcttgtatcttaatataatggctaataccgcctgttagtgttaattgtctggtgctataaaacatttttcgtgcagttttaatgtgtcatatagttgtattgatttatatgtatttatagagtccatcgtatatcaaaaatttgtattaaaggagtaattcatttcaatatgattcgactggtttttcgttagtagtctaaatcaaaaaacacttattattcctacagtaaaaatcagtttagatttcctcatctcttacaatagatattttgatataataaaatgctttgttcaagaaaaattcagagtatcataaataaagtataagtagcatttctgtaatagattgataggttattcttagttgaataatcagttatcctaaaagacttactccagtattgtggataactataatattgtttcagatattactgatgaaatgtagatacatatatatgtagaataattaataaaaacaacacaagatctattgagataggatcttttattttggatgaaaaaatttctgtttatttttttatgtttctgtaagagttgttgtatgtaagtggatgaaccatatcaattagtataagtataaacacccttacgtaagctctatatatcactaattaataaccctgatgttgtattattatttcttcttgttgttttctttttcttgtatgatattaagagttacttcttaatatcattactaagatgtatttaaataatatgattacccctggcatatttctcaataatcaaaggtctcttaacaagatctgatataattatcgctccctggaaatcctccaatcggattcaataccttatacaagccactgcgcacatagctgtaccaatccttcacccagacactcaggtgttacccttggaattgtgtatctactggatttccagttaggttccttacagtttctgacatatattgtaataaaatttagtcgactagaaaaaacaaatatgtgtagatcctatgatctataaaactcgtaattttatttttgttctgttagtgacatctgtgaaaaacaaattatagacaaaaataaaaaggcaattcatgaattagaatacctagcattgtattccttagttaatttttttttttatttttaagagaaattaattaattcataaaattgttgtttggatttttaaaagttgaattctatgttgtcatatcaagtattatttaatcacttatactctaaatatcttcatcgtatattattaccttgttaaaagtaaatattattgcttaaatatggaactctaaaataaaataaaataaatagaacaaagtgactttaacagatactaaatgataatatgctatttatttattatttagatatcactaaatttcacaaagaaaaattatttagtgttattgtatataaagctaaaattttcctcatattatattttcatatttatttacacattttgtgtattattgtatacttaatgattataaaatataattgaaaatgagctcactttattcagagcagattgacattaattctcaacacttttatataaattgaaagtatggaaaaaaaaatgtggaaaatagtttttcttcttaaaagtatagtccttttatctatttctaaaactcggtcaactatctactttaatgtattgatggattatcaattcacgccataatgattatctgtgtaactcaatagagtcttatgaatatcttatataaaatgtgacacagcagtagttagcatgtcatgggaacaatagacagttttagattcaaatatgatcttatttaatattagttgaggtaacattctgcttcgcagtaaggaattgttgtataataaaaaagttattaccaccaagattacataagattctgagtgaatctagaattatctattgttttaataagtcacatacttattactagtgaccataataattgtgtcgtttatcagtagtgcacctaattaccataattagtaaattggagtgtagttactaattcactagtgcacctgaactagtataataaatattaggatttagatcagtaaattcattaacgtatcaatctcaataattgatcgagctccagaaaacatataaaaggacaacgttttctgaagataaagaatcatcttctataattctttccttgtaaataatttatatattatatgtaaacaaaaatagaacaacaagcaagtaacaagtcaagtaacttcgaataaatatattagctcgataaaagcttctcaatatataagactgttttagtaattatattttcgtctatattgattactatctcgactatttgatattatttgcgcttcccaaacgtatacaaaagaattggatcactctatattacaacaaaaatgttgtaatgtgatgtggtcggagttttgtattattcggggtgttggaaaatgagagtttattactgtcattttcataagaattatttttaattagtttttctatatattatgtggtgtacggatgtacataatatcaggaaaacattttaattgtcaccaaatatgtctttcgaagatttgaaaagaaatgaaaaactttaaaagaaaacttaaagtaaataaaagaatgtatactgaatacactatataataaatatgtacaggtatttaatacaaaaacataacaagtatctataacttaatgatgtctatcattaccatggacgcagaaggctccaaattccaacacggggaaacgctaaaaatatcaaacggataatctattaataatcgagacaataattaatacaatcggtaatgcaattattaatacggtcttatatattaacggctgtatcgagcttatataattatactatttgcttattgtattctgcgttcaatgttgttcgttggttgctttgttgttgttttatatataatatatttaaattatgtgtaagagagtagtgacagaagatagttccatctacagaaaacgttgtccttttatatgttttctggaactcgatcaactattcaacctgatatattaatgaattagtaattcatatctttattattagttacaataatataatcgaagatcatagaacatttaggacaataggttatggtggcgcagtaacaacgatatatgaatacgctgtacactaggtggcaaatggacatgttgttcttaaaacataatagatcattttagattcagatagaatcttacgtaatctcggtggtgttatgtctttattacacaacgaaaaaataacagatgtctggttgtttggccgagcggtctaaggcgcctgattcaagaagcactgtgttcttaaccactggaaggtgggaatactcaggtatcgaaagatgcaagagttcgaatctcttagcaaccacttattttttgaggcatatattgccttgatatcactataaacgatattgcgaactttttagtcaatggcaatctgcttatttataaaacaaatatatctgtatatccgtgtatgttaatttgctccttgtgtacaggatagttcttgtgtatcacatataaaggtcaaagatcaagaattgcttatgaaattttgtattctagaagtgcatatctcttgtaacaggtcttcatctattaaagttgattatctatgaaatattaattcactttatattttttgatgtattactaaaacgtaactaaactaataaaattaatgttagctaaccgatatattttaagtaattaactgtcttggttgttaccttgcttgacttttgtttgtgttttttctgtatatctttatctttttctactatcaaggcctgcttgtaaaatcctcaaagaatagagcatttagaatagtgagggttatcagcagctttctaaaggaatatttaaaacttttcatatcaatagctgatgcattacttaaaagttaaatacgcaatatcctctagcacgaaatgttggactaactagataattaacaaaaaaaaatagatgtattctcatttattcttgttattttttttatatagaattttaggtttatctgtttctatttatgacttctaaattatattagtattctgaatttaagtatattttaaaataagaaatgaatttttacttcttatatattatattgttgaaattttttttaaaaaattatataaatgtgacaattaattttctactacattatattcatgaaggtaccattaaaaaacatatataattgttgtataggtagaatatttttaaacatttaaataaatacttaccgtatttttttgtatgtctcttaaagaattactaaggatttttctactttatataagacacagttcacgtgacagtcagtatttaatgtatatatattaatatataccatgttctgtattggaaagattataccttaattatgtttggtggtgtatcttgtttattaaaattttttctatcagcagtaaatctgtactatacgatagagtgctcgaaagagaaaagagtataaagggaatgtaattgttttctcgctttgtcatcagatctgcaaacacttaatgaaaataaaaaggaaaggtaaaaaaaaaagaaaatatatagacatgaggacaaagcaaaagatatcaaacaggtaaaaaaagaagtttgattcatttcgtttgtttatagacactatattcttgtaagatttccattaactaaaactattttcaatcgttttggtttgtttttatatagatttaggagacatttcctttatttttatttttcttcttaagaaattgtttagcatacaacaaatgcagagttataaggggaataaaataaacatatagattgataggtaagatctttattttttgcttaatataatcgaatagcatattatttcatattctgttgttgttgttttacatccatatatatatatatattctgaatggatattgttactgataacgaatactaataatgactaatacagatatgaatactgcaaaaaagcaagacaaaaataaaatcaaaataaaaagtaaatctagtaccacttcaaatttaccattaaagaaaaagaacaataatggcaatagtaataacgcccaatcaaataaaaattctaataatcaaaggtttttttgtaattatccgaattgtaataaatctttcactagattagaacatctaagtagacataacttaaatcattggcctaagaagatttttgaatgttcttttatatttcctgacactaatatgaaatgtgggaagacttttgtaagaagagatttattgattagacatgaaagaagacatgcaaatgaaaataataggcttgtatctaaaaaaaataaacaattaaaacaactgaaaatcatacagaatggattttcgtctgctaccactaaaaatattatttctgattcaaattcaaagttagaggtgaatcccaatgcaaataatcaactgaataacatgggtaattcactatcaagagatagcttgccaactataagcagtactatgccgtcatattcaaatgttaattttaattcttcatctatgtttaatcaaggtaataataacggtaatattcagagttatgatcaattctttgattgggtatttgataacaatgacaacaagaatcatcattatgcatccaatgtgaaaaataatgttgatttaaatacagtaaacctcaataataatttagtaactggtaacatcccaaataatcaatcaactgtgaaaaatcaagatcaaaaattacttggtgcttcaaatagcatagtagataatgctaatatattggtacctataccacagaatacctatccctctgtctcaaatttagcacagtttgattcaacaaaactaatagaggtccctcaacaaccaaatcccattcaaaaaaatacggttggtcaatatcatgaatctacttactttaatagtaatatgaatatttcacaaaatgggaacattaccgtaacacaaaataataatataaattcgccgcctgtgttaagtcaatcatctattatttcatctatacaaaatcataaacaagagcatcagcatttattacacccattaaattctcatgtggaaactcaattacaaggtccatctttagaaagtgtaccaccaaagttacaagacttgtattcattagattatttagcatctgatcctttacaacgttttatgcaagaactatctgccatgtatcctagtgagataagtaatattacaaatgagagtagtcttcttttaaccgaatctaataacgataataacattatgtctaatgggttagacaatatttttgtcccttcttcaatgcctatatctgtatccaataatagtagtaactttattcatactccagggtcactcactgattctagaatggctagtttgaataatattaaagtagataatgatattttgataaatgattccaccacatcgttgatatcaacaccctccaaagccaaacccaataaaatcaggaaaggcaatcatagcatccctaaattgcaggctctatctgttgatagtaggggaaattcaatcaaagataattatctagtcaaacactctaatataaatcaattgaaaaaacagccattagaaagtgataatacatctatgtcttcatcgaaatttaaaacattaaagatgataaacagtaagaaagagttacttgaatcaatgaaaaatgtacctagtatatttttccctgatccgaagacgaaatatcaactttcaaaggagaaatgtgaggaattatataatttaataccagaaataagaaatattcaatatgaaaccttagaaatttctttaaagtcatattggaaaaattttcatccacaacatggattactacataaaccctcatttaatgtaaatcaacaacctcctattttaatcatatccctaattatgacaggagctagttatttaggagttgatttcagaaaaacagtatcagatccgatttgtggtcctcttcgttggatcatttttgctcaccctgattttcaacctccatctagtacctatattattctttctttgttattgttggaatcttatgaaaagacttcgactaatagatattttcatgaaagatcatatttacatcatggtacaacaatacaactattacgaagaacaccctctttaggtggtcatcctttaagagacaagacaaaggatccagaagttgatgatgatggcactgatggacccaacgaattgaatagagttctaagtaagtggatagaatttgagagtttaaaacgtgttgctttcttcgcattttatatggacgttactcacgctatcgtatttgggtatatgaatttatttattagttttcgacagattcaattagatcttccttgtccggataaaatttgggaaagttatgatttaagttttgaggttttgaaggaatcagggtatggtgatcgaggtgatgatcagtcaaacaaccaaacttttttatttgcattaaagaaactaattagggatgcaattgataagatgataactgattctaataaagatcagaatgatattggaggcattattggtgatgtgactgaggatggtaacaagagttctgaaatttcatctcaaagttcaggtagtaatgacactgatggatattgtgataatgttagcggtgcacttcacttagaagatctgaaaaaatggaaacaaaatcatactttggcaatttatcgtcccatgactagtgtattagggaaaaaattaatgttagcaggtattttatcagttatgtttcaatgtcaagaagaaaatgacgatccgttgatagccaacatagtaattgatggtttcaacgatcacaatataacatggaaggaaattatatcatttgcaattaattattggatgtttgaagtacaaagagattgtcataaggaaaaaaattgttcacttatcaaggagataagtagatcagaaagtaacgagaatgtccaaggatacccaaacgatgagaatcctttggaagaaaaagtacttcaagttactgcatggaataataacgatgatgactgcaaattaccagtatatcatatgtcacagattattttaagaatatttcatcatgattattatatttcagcaggtgcaccctggagaatgaatgtaatgattggggataaagagtttcaatcaattcaacaaaggatgattcaattttcgaaggatacatatactggtggtgttacaataatatatgcttttcaatttttatttgaaatgtttgttaggaaagatccaattacaaatgagattacaatagataagaattacgacatcaatacagatattataagtacaagaccaaattcaatagcgttggtcacgttgttaatatggacatatacctttacactgtatggacctgaaattgtcatgtgggataatgaggaagataataacgaatgtgattcaaataagaatgaaaaacttgagagtaggaaaaagaaaaatgatgagcttcaactgaagtatgttccaatagaaagttttgaatcatatttaatcagaatgtatgatcacttatatatagagaaagatagtggtggtgcaataagttatcaaaagagggtatggaggaaagcagttctgttacaaaccatttctggacaaaataatacaattggatttattaaatatattaaggaaatattggaaaagagttattgggatcttaccaaggaattaagtagattactcaataattgtatacaaagaagtttgggtaaaaaaacacacgtttgccgtgatatgtacgatgtatagaactatataattgttctttatttatatatctggtaagttttatagaatcatatttgggttagataatcaggtctctcatatctagtttgaattaaagttatcttcactgtaaaaaggaaaaaaagaagtttggggaacaagaaagaaggctgcttatttcacatgcaagaatggaatcagactaacaagaaaaaaagcaatcgcaattttatttttagtaggtcttcgatcatgttgaagtgcgatacacatagaataaaggtaaacttccttctactaaccatactgaccctttcttcgagtgttttttttcatcttcaagcatttgtttttttcgagtgaaattaatttgttatgataaatattttcttcaatttttcttttttgtctcgatgcctttgtcagttcagaatgcaaaggaaaaaagtctgattttgttagatagcgtatctgtaactgttgatctcgagttaagatatatatatatatacagatggatagaagatcgaaggcattatcttacaatggtttcgaaaagacctgttacatatatcttatatattttaataactttgaatgtattgactctttaataagaaaacgaagaggaattgttctatttagcatttaaaatatgggccgaaaacaaattataaatttatagtaaatggaacaaattaattcaaatagtgaaaaaaagattcagcagatagatatattcaaaaaatatgcatctgttcgaaatatcacccttaaaggtgcaacttcgggtgatacaacacatgatgattccaaaaattcaggggaattggtaatgctctatgatgatttcatcaaattaatctccaattccaaaaaattatactccaagtttacagatcattcattcaatttgaatcaagtaccttcgaatacatttggttgtatatttttcgccatcgatgaaaataataaaggttatttaaccataagtgattggttttacttcaataacatcttagagcaagaaaattatcatcttattttattatacgagtttttcaggaaatttgatcaagcggcaatcagacattctccaatattgtctaagtcggagttgatgaataaaagttatttacttagaccaatcaattatagtaataaattcttaagttttgatgaattactattaagtgtggaacaatttaaagcgactataaatctattgcatgattgtgttgatgataaattttcaaagaaatataatttgtttatagactgggataaattctcttgcttatcgttctatgaatgctttccttttggtagggacaaaaaaaatccagagaaagcgtcgtttttaactttgaattcattaattactattcttcaaaatgacttgaaaaatcaaagattgacaaagggttttgaacaattatgtcatagagatcctgtgaagggtaatctggtcataaataaatctcaattaatggatttattaagttattatttctcgcacaaagtttcttcagatatcttccagtctttgaatttatcaaatacatctttattgaagtctaaaaataacgccataccttacaatgtttttaaagatattttttatttgtttcagaattttgatcttttgaatcaagctttattaaaatattcaatggagaatggactcacggaagatgatatgagagaacatataattacaaagagagattttatgaaaatattaaatgcacagtattataaagtaaataatatcaatgaattctctccatcacaaatcaatttattgttctctatagtagcaaattctaagaaaaataatgaggctagtcaaaaagagatctctaaattagaacatcatcatgattctaaaattgacaaatatattcagaatgaatatcaaagaggagaaaatatttcaaagaaacaattacaaacattcaatgataattatttgatatcattagagacatttgctcaagatgcttcttttaagaagttgtctcaaatttctatagactattttcaacagttattttatggcaagacggatcaggctacaatgggttcaaaattaactatacaagattttttaaagattttaaatcccaattatttaaatgatgtagttcatcaattggaattgaggcatgtacaaaatgaatcactttatgtcaactactatttttatcccatttttgattctatgtataattttgttttaggttcaatagctggttgtgttggagccaccgttgtctatcctattgattttgttaaaacgcgaatgcaggcacaaagaactgttttaaagtataaaaactctttagattgtctctcaaaggtagttagacaagaaggtataagaggattatactctggtttaggattccaattaattggtgttgctcctgaaaaagctatcaaattaacagtaaatgattacatgaggaaaaatttggttgataagaagggaaatttacatatatttagtgaaattatagcaggttgtatggcaggaacttgtcaagtgatttttacaaatccaattgaaattgtcaagatcagacttcaagtgaaatcagaatataaatctaatgttgatataaccgcaagaaatataatttcaaaattgggacttcgaggactttacaagggtgttacagcctgtctgatgagagacgttccattttctgcgatatatttcccaacgtatgcacatttgaaaaaggatatttttaattttgatccattggataagaataagagaaatagattaaaaacttgggaattgctggttgctggtgctttagcagggatgcctgctgcattcttaacaacaccttttgatgtcataaaaacgagacttcaagttgtccctaaaaagggagaaacagcatattctggtatttttcatgctgttaaaacaatactaaaagaagaaagtatgaaaagctttttcaaaggtggtggtgctagggtgcttagaagttcacctcaatttggttttacccttgccgcatatgaattgctgaagaacgtgtttccattgccaaacttggaggagaaagaaagtaagattgaatatgaaaagcgagtatatttatctgatttagatgaagtgccatcaataacttcacaagtcactgctctagttaataaaactaaatattatccctcgtattcagagtcgcattcaaatacacatgattttttcaattcaacatttaatctgtataatagtaactatttgaattattattataaaagctgtagggttgctaagatttttattgatttggatacttctttctctaaatttgactacaacgcttacatggagttccataaaaaactcattgagcttaataaaaaatgacatttactttactacaaacagtatgttatctttgttcaaaaatagttttatttatgtgtgtataaatagatatgttttttttaccaacaacgacagacatctatgtttatatagtatatatatgtgtgtgtgatcttatcatacaaggaaattgatttttatcaatacgttatctgatatagttgaaactgtattgctacataaatacgactggagtggtttgtattaaattatgtaaccactttttgtagttgtagctataaaggtgttgagggtatcgattgttaagctgctataaattttactatcagacttctcttgctttgtttttactgtatttgtttacagatacgtgatgaaaaattttgagataagatgagatgagttgagttgacacgaggaaaaaaattaaaataacaaaaaatttcatttttaatgatttaaattaaataatgtttagaatagtgttttaaacagaataaaaacgacttgtactctttgttatctcattagatcccagaggacaaaggatcctattggaaagcatacaaaaatatagttaattgaatataatatcatggatatttttagagtcttaacaagaggtgcatcagtcaacaagaagaaaaccgagggtaataatgctgttgatgacagtaggaaaggtgaggtcgccaatttcagcgcttctactaatcttaataaacaaccacaaaatgacactgagatagtaaaagaattagatttttttcgtaataaaagaataatgcatactgtcaatgaaaggaaagaacatgaaaataaggatgatgatgataacaacactgaggaaaaaggtgaattaaatgaaaaggtcgaagaagatataaaaccaaaaatcacatcagtgtcggaggcgttagcgttacgtaaatcctataaaggtaatgtttcaggagaagatattccgctgcctattgggtcgtttgaagatttgattagtagatttttctttgataaaagattattaaataatttgatcgaaaatcactttactgaacccactcctattcagtgtgaaactattccattagccttacataacagagatattttagcttgtgcaccaacaggttctggtaagactttagcgtttttgatcccaatggttcaacaaattatcaatgaaaaaaaaacagaaggattaaaaggattaattatatcaccaactaaagaattagccaatcaaatatttattgaatgtataaaattatcgaataagatttttttatcaaagaaaaggtcattacaagttgctctattatctaaatcgttaagtggtaaattgagaaacaaagttgttagtagcaaaaaatatgatataataataactacgccattaagattgattgatgttgtgaaaaatgaagctcttgatctatctaatgttaaacatatagtgtttgatgaagcagataaattgtttgataaaacttttgttgaacaaactgatgacattttagggtcttgtactaattcaagtttgcgtaaggctatgttttctgctacaattccgtcaagtgtggaggaaatggctaaaaccattatgatggatccggttagagtaattattggtcataaagaggccgctaatgctaatattgaacaagaactaatttattgtgggaacgaagaagggaaattaattgctattagacaactagtacaagatggtaaatttaaaccaccagtaattattttcttggaatctattactagagccaaggcattatatcatgagttaatgtatgatagattgaatgtagatgttattcacgcggaaagaactgcagtacaaagagaaaaaataatcgaaagattcaaaataggtgatttatggtgtttaatctgtacagatgttttggcccgtggtattgattttaaaggtgttaacctcataataaactatgatgttccaagaacagcacaagcatatgttcataggattggtagaactggtagaggtggtcgtcatggtaaagccgttaccttttatacaaaacaagattctgttgctataaaaccggtgataaatgttatgaagcaaagtggatgtgaagttccagaatggatgagtaaaatagcaaagatgagtaaaagagagaaggagtcattaaagaaaggcaagttgcataaggaaagaaaacagattagtacagtaccaaagattgataagataaagagaaaacgtagacaagaaatgattgaagcatctaaaagaagaaaattgcattcaaagaaacaagaggaagacaaatagatacggtaataaataaataaataaataaataaaagaatgaaagtaaaccaataagttaataagttgtaatatcatttatagatgaatagatatatatatgtttatgtgaatgtatagtaggtatgtttaatacttttgttgaagtgtcgttattagctaagtatctgaaatctctctgctagtttgtaattagaataaggttatacatttactgcatttatatttacaatgataacactggtaatatggtgctaataacttttctaagaagagattgttaagtcacacacatatagcacaatctctccacagatttaggaagtgtaaaaaaaaaaaagaaaaaaaagaaataaagataacaataaaaacaaaaataaaaactgaacttaaagatgcaatagaaactccctctacaaactgacttaaaagaactttgtaacagaaccattcaagtgaggtgtgttagaattagaaaaagaaaaggaagagaaaagaaatatacgtttagtaaaacaagaccgataaatagaaatttggttacaaaaaaaaaacaaagaatgagttactgttgtgcctttagtgattgccgttgtaggattctaaaaatagatagtgcaccaattgtgaaagtgccatcaatggtattagataaattccacttgatgcaaaagagtaaagatcaagacttagaagagtataccgattttattttaatcaatgatgtttgggattttgacaacataggtgtatccaaagagatactagcaaactcggagatattggatcgcgtagaattcgaacacgataatagaaaatggcagatcgagaaacatctaaaatatttagtatgtgcaaactgtgataaaggcccaattggagtagtttgttcaactaaaagtgacaaccaaacgaagataatatatttattaagtataccaagtgtttctcaaatataaaagaatatgttttactttcctggttttatagatttttatctgacgaaccgatgatatatcatggatttttcgacgatagaaagccattctaatattacatttccactagtatctagccagttgatttttccacttgtttgtgactctctttgtctagccatccatttatttatggccacatctctatagaaatacgtttctcggttggtgcgatggctgttacccgcaaaagattagaaagaaaatttttttctttttttttttttttgatcgatgtggaaaaaatttttggacttaaaagtggaaaaaattgcttccaaaagtatacgcactcttttactggggggaaatgtggataatgtggtattgagtgtgaagttttcataataagtcttacgtataatatataaccaacagttttaaactatttttattccccccttttgtttttctcatatataggagggagtgtgtatagtctgttttttttctccaaatatattttaggatattaagaataagttattcagaacatatcgtttgtccagacacgagtttacttatttatttaatatcattatatcatggctactagaactcagtttgaaaattctaatgaaattggtgtcttttctaaattaaccaacacatattgtttagtggcagttggtggttcagaaaatttctattctgcctttgaagctgaattgggtgatgctattccaattgcccataccactattgcaggcactcgtataattgggcgtatgaccgcaggtaatcgtagaggtcttttagtccccacacagactactgatcaagaactacaacatttaagaaacagtttgccagatgaagtcaaaatccaaagagtggaggagaggttgtctgcactaggtaatgttatttgttgtaatgattatgtcgcattagttcatccagatattgatagagaaactgaagaacttataagtgatgtccttggtgttgaagtgtttcgtcaaaccatctctggtaatatccttgtcggttcctattgtgccctaagtaatcaaggtgccttagttcatccacaaacttctattcaagatcaagaagaactatcctctttattacaggttcctttggtggctggtacagttaatcgtggtagctctgtggttggtgctgggatggtagtaaatgattatttggcagtcactgggttagatactacagctcctgagctatctgttattgaaagtattttccgtctacaggatgctcatccagaatctatatcaggcaacttacgtgacactctgattgaaacgtattcctaattgttaatggatttgtccttttttccttccttcctactgtcattacacttttttttttaactttgacttcaattctgatttcatttgttaatagcagttggagtggtgtggttaaaaagttatttttatacttacttgctttccccatttaacgcatctgttttattaatatcacttataattcatttgtatattgacatatatatatatatatatatattgtcatgttctgtataagcatctatatatttttaataacaacacccagcatttcatccctttcaaaatggtaaaatcttaagaagagagggcagattagaaattgttttagtccattttcttgtctattttagaattttcttttaacaattataatatagaacgcttaaacagactttctaattatctgtgggtatagtacaaggcactagtcaagagacatggaagggacaagtggcacaatatacttattttccccttttccctttatgaatagtacgtactaataataatgataaaagaaaaaatgcataaaaaagatattcattaaaaaattcgtgtcattacattatatacatatatatatatatatatatatgaaataattaccattagagttatataatctcaatcattattctatcttttataaattatatcaaaataagggggcgtggtaggggatagagaaaaggaaatagtgaatatatacttttcatcaaaacaaacaatcattcaattcactcgacaaaagtgatgagtttagttggcagcgacgtgttcaactaagtcaacgactctggtggagtaaccgtattcgttatcgtaccaagagaccaacttgacgaattttggagataattggataccagcagcagcatcgaagatggaagagtgggagtcacctaagaagtcagaggagacaacagcgtcttcagtgtagcctaagacacccttcaacttaccttcagcggcagccttgacggtggccttgatttggtcgtaggtagtttccttggctaacttaacagttaagtcgacgacggagacatctacggttggaactctgaaagccataccggtcaatttaccttgtaattctggtaagaccttaccgacagccttggcagcaccggtggaggatgggatgatgttaccagaagcggttctaccacccctccagtccttgtgggatggaccatcgacagtcttttgggtagcagttaaggagtggacagtagtcattagaccttcttcgataccgaaagcgtcgttgatgaccttagctaatggagccaaacagttagtggtacaggaggcattggagacgatggtttgaccagcatatttgtcttcgttgacacctacaacgaacattggggcggtgctagatggggcggtgatgacgaccttcttggcaccggcgtcaatgtgcttttgagcggtgtctaattccttgaagacaccagtggagtcgatggcgatatcgaccttagaagcaccccatggtaggttagctgggtctctttcttggtagacagcgatcttgtggccgtcgacaatcaagttcttgtcatcgtgggagacttcacctgggtatctaccgtgggtggagtcgtacttgaacatgtaagcagcgtagtcattggcaatgaatgggtcgttgatagcaacaacttcaacgttctttctagataaagcaactcttaagactaatctaccgattctaccgaaaccgttaatagcgactctaaccatgttgtaaatttatttgaaggtgaatgtgtgtttgtgtctttttttttgattgatccagatgaaactaatgtttcttggtttttttcccctttgcataaatgctaagagtgggattagtacagatgaggagcaaggaggaaaaagaattgattcagagagtagaaagagatctccttatataataatctggaaagtccatgtaggtgctttttatttttattattttttttttttgttttttttttttttccaagttctagtttatttcatttcaattgtttttaattctcttgtatatacaaagacacattaataacaacctctaattttgtgaaacattagaatcacacgaatcgactaacacaaatgttgagatttaccatcttagtaatgattaaaatgaccgcacgaaagacaatagctggagtgaaaataaaacaaaaataaaaaatactattactattattattattattgtcactacatcattaagaattgagtattaatcatggattctgagttaagtgatagttaataaaatcataatgaaaggaaaaaaggatgtcacaaaggaaattaatgggaaataaaaaaagaaagaaagaaagagaagaacagttttttctttttgttttctccaaaagggaaagtgaaaaaagaaagaataaaaaaaaaaagtccctcaagttcaactgatgaatttttctctttttttttttgtgacacaacaccgtgacacatgacaccgtataacacacacacacacacacacgtgaaagagaggaagagggagggaagggaaaaggagaggaaaatccctcccagccaaccagaacaattctcataacgtaacgtcgatcttccaaacatcatcagacaacaccaacagaaagatgtggaaggggcgaaaaaaaaaaaagaaatgaaatcaaatgaaatcaaatgaaaataccaaagtccccgccatcaccttatttatttttcctgttttagtcggcggctcgaaggaccaaccgagcaacttttgttaagggaggcagccacacacactgaaacaataaaacttactggaaaacataacataacaaaacaaaacaaaacaaaataaatttgaatacaacagcggtggtggtgtgtgggtgttttggtatgtgagagtccgtattcgtgttttttccccgttctgtggaattgggtagctaccgaagggaggagaaggtatgggtggtactttttcttttttcagtttctgctcctctagtgggtacagggtatgtatgggtgtatgcgtgtgctttcatggggggtggaaagaaaaagagaaagagaaagagaaagatcagtgggatcagagacactatatgtatttatatatgtgcattgacaattttcctaagaaagtatatatatatatatatatattgttgaaatttaaaagatgtgcagtaataacctataagttataacagaattttatgaatcgtatttttataagtaatcgctcacagtattaaataatacatatattatatacaaaactatgtattacgtatataaagtcgtgagtaaaagaaattatttctaatttctatatcttgactatttatacttttcagaaagttaattttgaaaaaaaaagtttttcacaaaattttcattgagtctgggtaatatctcaacatatatatatgggggggtgtgcatatatcaatattattcttacttgttttattttatgtaattgatattgtaaaaatgttttaatgggataaatgaatgatgttatgtattcggtttttctaataatgtttgctccttctctcttactctttcttccagtctctgttttcctttagctcatctagattataatttctattttgccataaggatgcttaacataacaaatagatctaacaattatgtattggggaaaaaaaaccttttttttttccttttcctttcttttcttttcttttttgttttcttgtaagtaatatattctggttttgtaaaaccaattcaattataaaacaatttaaaaatttataatatgatattgatgacaagtataatttccattttctactgtttctgttatttttttttattatattttttttttttgtttattttgcattcatggtttataagaaattatatcatttctgaaaaaaacataaaaaaaaaattataaagagttgactaataaacttttgtaaaggttatctcgagtgatatactaaaatatggatattaattatatatataatgttgggaatgagcgcctttattcattggatatatagtaaacattctcaatattatattaaacagatttagtatacaaaattataataaagttcttcactttctttctctatatacaacatagaaataataatatacaaagattgtaaataagataaaaataatgtatgatgaaatccttggctttatatatgttaacattcagccattttcctctacgaacagtaagatatttaataaataaactcaacaacttttggtgacctctcaacaattattactcaacaatttatcgtttagtgtctgctaaaatcttattgttctatctattttatcatagaacattctatttcaacatataaacacttacaaattatatatttggttgattctaactattaaatagattagtcttggatattcgtcttgttcttcttaacctattagatagattatgaatattaatgctgataattaccgctgacactatctctcaataatcaagggcattttaagtaagcttcttaacaatttgccaccaatgtccatccgatgatcatatgttcgttcgaatacactcacaaccttgggcctagagtttcagttgttccaagtccttcgcatcgacattaggcgttactcgcagactatgtatttcaggatttccagttagggctccttacaactttattctaatacaataaataattgattttattatcctcttatctaagtccaaaacttatgtctgcacatcaatactaatacataaacacacacacacatatatatatattatgaatatttattcttgaatgcttgaattatttcttaatgatttaaaacttcttaaaatgaagctgatctaaatttttactactaagaaattttttttgaacataataaaaactttataaaaatcagctatagtatccctagacttttaatactaataacaaatccaaattgaaaaattaaaaaaataaaaagccaagcttgattcatctttctctctttccctctctccctttatatgaaatggaattcacattaaattgattctttagtaatagtaaattattttaccaagattaaaataaaaataaaaaagaaagtaaatataaaaataataagaaaattatagaaaagtatttgatgttaatcaatttaatctctttttttattgttgctgtcattattattattattattattattattattgatatatcatattatataaaagatgattatttaacttctcaaaccctttatactgctgccacaaccaaaatcagatctatatctgattataaaacattgtaaccacttctaagatctaacaatatatagcttattgtgattatccgcttttactttcagcatacactgcccaatttgttcaactgttactaaccttgtagaattaggttgcgttttttttttatataatctagtgaaaaatggaaaaaaaaaaaacagaaaatttcttggcttatctcttttttcccatatttggaagtaaaagatccgatgatttggtaaaatcggaattttttttttcttcttcttatacaataaataaacataataaaacactgccttagtcatcgactcaccttatctatctttttccacaccgccttttcacttctctaaatttcgatagatttatcaacaactataactcatactctataaataaatttgttgaaaagataatgtccgaattatctagatttacttctatattgttcgaggattccactatatctttaatagctggtggattggctggtgttgtctctagaaccactgtttcaccttttgagagagtcaaaatccttttgcaattacaaggctccttgcctcagacccaatataatagaggagtagtgaatgcaatcaaacagttataccaggaagaaggaatcaaaggtttatttcgtggtaatggattaaattgtatacgtatatttccatacagtgcagtgcaatttgccatctttgaatatatcaaaaaacacatattccatgtcgataagtatcatggtcaattatctaatggacagagactgtttgcgggttttatgggggcagccgcaagtttattagtaactcaaccactagatttagttagaataagactttcggtacaaacagccaatctacaaaatttaaacgaaagcagagcaaaagatattcgaaagccacctggtttctacactctgtttaagcagatatataaaaatgaaggtggtatatatggtttatacagggggatgattccaactgcatatcaagtattaccttgtgtcgcattaaattttgcagtctatgagcaattaaaagaattccatgatagttctaactcaacgatgtggttatataaactgatgtttggagcgatcagtggtgctgtttcccagactgctacatatccgtttgatttactacgcaagagatttcaaattatgaatatgggaaaaaatgaaatgggattcaaatatacaggtatctgggatggtttaaagaccatttatctcactgaaggtccactagggtattacaagggtttaacagcaaatctatgcaaagttatcccatctacagcagtaagttggcttgtctatgaaattgtttgggattttatgaaatataattctgcctcaactttgtaaagatgaaaccactgaaacataggcgtaatgctaaaacatgataccttttggcactgtccattacgactatatgaccttaaagaatcgcacaaatccggtgttaggctaccccatccccaccgaaagaaaaagaaaaacaacaacaaggaaacaccgaagtttgatttggtagggcagtcacccacccagatcaatgtaaaaaagtcgaagatatatatgatgttatgtttttcgattgcttctttgaacagtctttcatatggttgtcatgaatcatcatcataatcataatcattataaacgccgtcaataacgttttacctttcattccaaaactctctatgtttgtccaatgaattagctttgatttctgtagagatttattattgtcgtttttggtgatatctaatttccgacaaatccagagtagcctttcaaaacttgcaaggggggagggatgaaggagaaagaaaaggaagagagtgatgataaactaaaggccatcaaggtagggatcaagcagataaaggatcacttgtacgaaataacttacattattcataatatatatggagaaacctcacttcctctgttaataccgtctgttgaaacgctacagaacaaagtgtttaacccaagaaggttgataactcaacagatatataatatatcgagtagtatacatatataataatagacaacgtgtaacagaatgcaaccatccttaagattgttgaatgcagccgtatgtgagtgaacaataaaaaaaatatgtttactagtattacaatgtatatatttacttcgtttatattttctcttactaacagtgtttttaatttataacagaaaaagacttctaaacttcctttcccagttgaattaactccattatttatggcaattagtgttgctctttgttctggttcatatttcacatataaaaagctaacgaccgataagagtttgagactcattactaatccagaacagtctgctttagaagatgttctacaacaaaaagagaacaacgacaactaaaagtagtttttaaaaatttctactttattctgctttatttcaattttttattctaattttgcaattatttattcgatattattccagaaatcaaaaaagaaaaagaaattaataacaccaaaatttggacatattaacaatatttattctaactataacgtgtgtacataaaagggaaaaatcaatctactacaatttttactttgtttattcttttctgtgtattaataatttttttgtagaatattagtgttgatatatacaagtatttaaatatggcctcctataatccatattcaagataaactataagtattttgccgtgcaaatgttgttaaaagagttctaagggtcaattatggacacttaatatattttataacgagaaaaggaaagggtctggcatatatatactatatttgtctttgttacggattttcagattaaaagaagttaacgaagtattttaatctacctgcagtaagtatgcagtagtagctagtcacagacaacgtagtattatacagttagaatcgaattactgagaactacaaaatattagctgttgtgtgtcgttaactgtataattatcattgttattattaattattcaaaataaaatcttgctcgagaatgtgtttttttcatagattagtctaataaataatgatattacatcactatgaaataatattgacactatctcctccttttttttttttctttttttcgtaattatgatgtaagaagatgaagtgataaatgccacatcttttatgtttcttaatccttaacttacgactaaaataacaaatacaactttctatttccagaagttcgtctataacaattcttgtgatcacgtggctttaggtaattttttttttgtaaagtatagaaaaaaaaataaaaaaaatttttttcttcttcattttgtaactaaaaaaaaattttaatgctcatcgcaagatatcaaaagagcacattactttcattaactatacattaacatactttgacatagtaaatctgctagttctctcatttataactacgataatcaacgtagaagggaaataaaaaataattcaggaaagtgaaggatcactgccatgagtaagattattaaaccaccaagcggtgtgagatcagctcacttcagaactcttgaaagagaatcccgttttataaatcctcccaaagacaaaactgctttcccactattaaaggaagcaattgaacctcatgttggttcatttaatgcattgactgaaggaccagatggtggccttctaaatcaagctattgaagatattggtgaaaaagtcatctttgatggaaacttgggaacagatgaaaatattaatagtaattacttaggtaacagattgtctgttagtattgagcaagtctccattagtaaaccaatgtctaatgaaggtatctcttcagcggttgaaagaaaatttttcccatctgaagctagacaaagattaacatcgtataaaggtaaattgatgttgaaattaaaatggaatgtcaacaacggcgaagaagtttttaccgaagttagagattgtggtggcttaccaatcatgttacaaagtaataggtgccacttaaataaattatctccatacgaattggttcaacatagagaagaatcagatgaacttggtggttattttattatcaatgggattgaaaaactaataagaatgttgattgttcaacgtagaaaccatccaatggccattatcagaccatcctttacgaacagaggtacctcatacacacattttggtattcaaattaggtctaccagaccagatcaaacttcccaaactaatgttttacattatttaaatgatggtcaggtcactttcagattttcttggagaaaaaatgaatatctagtaccagttgttatgattttgaaagccttatgtgatactagtgatagagaaattttcgatggtattgttggttctgatacttccaattcctttttaactgatcgtttagaattgttattacgtggtttcaaaaagagatacccaactttacaaaaccgtacccaagttctacaatacattggtgacaaattccgttttgtattccaagcttctaccgataaaagcgattatgaagttggtcaagaagtattagaccgtatcgtgctagttcatcttggcaaacaaaataatgtagacaaatcaagattattattgtttatgattagaaaattatactcactagttgctggtgaatgtgcaccagacaatccagatgctactcaacatcaagaagtcttattaggtgggttcttatatggtatgatcttaaaagaaaagatggacgaataccttcaaggaattattgcccaaattagaaccgatgtcaatcgtggtgttgccattaatttcaaggatcgcaaatacatgaacagagtcttgtcaagagtaaatgaaaatatcggttctaagttacaatacttcttatctactggtaacttagtgtctcaatctggtttagatttacaacaagtttccggttataccgttgtcgctgaaaaaatcaatttctaccgttttatctcacattttagaatggttcatagagggtctttctttgctcaattaaaaaccactacagttagaaagttgttaccagaatcttggggtttcttatgtcccgtacataccccagatggttctccatgtggtttgttgaaccattttgcccataaatgtcgtatttcaacccaacaatctgatgtttctaaagtgccaagtttactatttagcttaggtgtttccccagcttcacacacttttgctgcaggtccatctatgtgctgtgttcaactagatggtaagatcattggttggaccacccatgaacaaggtaagataattgctgacacactaagatttttaaaagttgaaggtaagactgaaggtttaccattagatttggaaattggttacgttccaccatctactaaaggtcaatatcctggtttatacattttcggtggtcattccagaatgatgcgtcctgttcgttacctaccattagacaaagaagatattgttggtccgtttgaacaagtttatatgaatattgcagttactcctcaggaaatagagaataatgtccactcacacgttgaattcagtccaactaacattctttctattttagccaatttaacgccattttccgatttcaatcaatctccaagaaatatgtaccaatgtcaaatgggtaaacaaacaatgggtactcctggtgtagctttatgtcatcgttccgacaataaattatatagattgcaaacaggtcaaacaccaattgtcaaagctaatctttatgatgattacggtatggacaacttccctaatggtaccaacgccgttgttgctgttatttcttatactggttatgatatggatgatgcaatgattattaataagtctgctgatgagagaggttttgcatatgggactatgtacaaagttgaaaagatagatttatccttaaacagaagtcgtggtgatccaattactcaacattttggttttggtactgatgaatggccagaagaatggttggaaaaactggatgaagatggtttaccatatattggtacctatgttgaagaaggtgatccaatttgtgcatactttgatgctaccattaacaagacaaaagttaaaacttaccattcttcagaaccggcttatatagaggaagtcaatctaattggagacgaatccaataaatttcaagaattgcaaactatcagtattaaataccgtattagaagaaccccacaaatcggtgataaattctcttccagacatggccagaagggtgtttgttctagaaaatggccaactattgatatgccattcagtgaaacaggtattcagcctgatatcatcattaacccacatgctttcccttcgcgtatgaccattggtatgttcgttgaatcgttagctggtaaagctggtgctttacacggtattgcacaggatgctaccccttggattttcaatgaagaagatactccggctgattactttggtgaacagttattaaaagctggctacaattaccatggtaatgaaccaatgtactcaggtgctacgggtgaggaattaagatgcgatatatacattggtgttgtttactatcaaagattgagacatatggtcaacgataagttccaagtccgttccactggtccggttaacagtttgaccatgcaaccagtcaagggtagaaagagacatggtggtatccgtgttggtgaaatggaaagagatgcactgattggtcacggtacgtcgtttttattgcaagatcgtttactcaactgttcagattatacacaaagctccatatgtcgtgagtgtggctccattttaactactcaacaaagtgttccaagaattggtgctgctgctttgacaacatgtcgccgttgtgctgttaaattcgacgatgctaagaagatgattgctgaataccaaggtgacgataagatatttattgacgattcccaaatctgggaagatggtcaaggtaacaagtttgttggtggtaccaacactacgactgttgccataccgttcgtattgaaatacttggattctgagttaactgcaatgggtattagacttcgttacaacgtagaaccaaaataaaccacattatctttaaattgtcattgttaaaaaaattattactttatgtttaaagcttcatttaacagattaaaattataaaaataccagatttctgcttatctgtaatatagaattgctttagaaacagatctttttttatgtttttattcctattgatatatatgaatatatgcttatttttttactttatatatgcaaatatatatttacatcaagactatatcaaataaagtaactttaaagtaccaaaattttccaagttaatatagtagggatatgtttacttactgtgcgccacaattgaaaaacatagatcatataaattctttttctctttatggaagaaagagtcatgcaaaatgcaacatatattcaatgccttctgatatatcctacttgttgttacaaaaaagaaagaattaataaaacagcaccgaagaaatttgtaaatcataaccgctatttttatattggaaatgatacctgaagacctgcaattcgaaaatcttcaacagtcatttcatctagatttttacctgtcactcgatgaatttcattaaaaatgtttgtgtcacttttggttaatcctcttgaaaaactacattgttccactctccacttatttgcacaagatgtttttttcttatgatttttcaatttaagacatgaagaacatgtttgaaacagtacaattttattaatatattttaaaagtctgtaatgctttctagcaccattattgtgattaccgttgctattagaattatctacattgtcgacaaacaattcttttggtaacacatgataccgtaatacagtttttgatagctcctcaacttcagaaggttttaaaatattaaccaacttctgtgaaatctcatttataattctatcatcttcatataaaatttcaattttggcatcgcatttgacttttcttgacctacatgtgtcacaacttggtcccaatctctgccttttccttgattgggagaaactcttattgaagaaagtgggactaattgaagaaagtggagtttgcttaaagacaacaggtgcaccatgtacaatattctgttcattacaattatacggcgaataaggaagttgtattatattttgtgaagaaaaggaagaacttctttttgttgtgtcaccaccacctaaaatagaataggattttgtgatgcttattggcgtgtctgtgggaaacggtctaacagaagagtatggcatatttcgaagctgtggaggatttgaagacacatatctttgttgatatatgggttgtggattagaaaatatagctggattaatatgacagttactagtattatttactggccaatatataccattgttagaagtaattggaacattattagacggtactgttctattagtgctctgtatagtatttgttgttgtatttattggagactgtatattagtgttagttgatgtttgattgtaatttggcaataatagtggatgcattgatctattagcattcattattggcgtgcttttagtcacttttttggttaagtgagtaccattgatagtgtttatatttttattttgaaaagcattgaatcccgtctgtgcgttacggatatttggaaatgctggatatactagtaaattattaggttggcaggtaactatatcttctttattcatgaattattgtgtaataaaactgatatataagaaaataattagacagaacaaaataaactgaaaattgctagtgtgttaactcacaaaaataaaacatatagtaacaaaagtacaagcaacaaacagaggtagaacaaacaaagacgcacacacaaacaaataatagaagaaaaaagttttctttttgtactttttgtgcgacctttggaattgaatataaattctaaaagaaattcctacaaaaaattattctgattgttgaggtttttaaacaaaaaaaatattttctccactatttttataaaatatcttatagagttgttagacaccaagagtcttttttcagttccaattgtattttctcagtacgttgcgaggtcttgaatactttggggaggcatatgcgcatacatatacatgtatacatacgaatatatatatatatattcatatttttttttgtttaaatacacacatctttgagatcttgatatcatacttttttactttttttaatcttttgttttgctactttatactctcgacccttgacaatgcggcagtactccacctattgttatttgtttactgttctgtttttatttttgaaatggcaatatagacaaaacacaaaaaaaaataaaaaaatgaaaaaaaaaaaagaaaaaagaaaaaagaaaaagagaacaagccaaaaaaagctactgaggagtgacattttacatgcagaaagtccccctattcccttttctacgcaatgtcgaaagcagaaattcatggagacaataaagaaaacataatggaaaaaacataattttccgaaaagatctgcctttcactgtttttcaaaacaaaaacaaaacccatgtgcaatcaggttttttttttttttttttttttcaaacttaccaaaataacaatgcaaaatgtttcattattgacgaatatatttgctatacaaaacgccgttgtaaagaagtggaggaacaacccagctgtgtattgtattatttataataaggggattttctttatgtaatgaaaatttcttatacacagatattcagtttataaggtaacaatcataagcggtataaaagtttaatcaaacattacagtaatactattgtgtatgaatccctaaataaaaatttcctttccataagtccgttgtctatcaatagagtaaaaaggaaaaatagtcatgatttaaaaactctagatttaaactgccaagctgtagaagataaattaaagtacaaaaaaataatatggaatatctaagggaaaagaaaataggcgttgtttacttaatattaaatataggatctgatctaaccagagtaataatctagaactgagtagcgtagtatctgtttttataaaacaaaataaattttgttttataaaatgataggcacttactcttgaacaaatttttaatctttatttttactctggaaaattgtctaaactaattaagcatattccaaaaatatttgtacacagataatcaaatcattaattattcaagtcaacaaaatagtatttgtacctaatgtaaaaaagtatactaaagtctagatcatattttaattatcaaaataaaaataaaaataaaacaaaaaaaaaagactttactctttctatttttcttagaaacatacacacgcacacatacacaaacaaaatgtcgcttgttgacttgttgccttgattagcatatgcggctagaatgagacatttccttttttcggacgtacgacatttttgtttgagtatgagaaacgacttttcgtctattgtttaaatttctttagggtgaaaaaatatatcaaattttagtcgccgagctttttcctgtgttaaagcaaagtctgaatatggtgttgtaattaaaaaagaaaaaagaatgcgactcttcacataaacaagttctgtcctgtctaaataaattgtattctcttgtttccactaagaatatgaaaggtaattggtgaatgagacaaacagattcatatcctctttaaaaaagaaaatctttgaagtatatataatgtaatatatcattatatcaattgtttctttttttagctctgtcaataaaatgaccaaaacaatactatctttccttcaattgtcatctaaaaattatcctaaaaatttatatttaactttgcttttattagaaatttgtgttaagacagtatttctaaattgaaaatacattttcacaagagctataaataatgattttcttgtactactttttaattaattaattatttatttatttacttattcatttatatcttttttatatcaggtctgtttcgaatcaccttttttggtacaataccacataacttcggagtgataattcttacttcattaaattatttttatttcttttaaaaaaagggaaaaaaagaaaattaacattgtgcaatggtataataaagaaaagcacttgaagaataaacaaagatatttacacaatacagcaaaaaaagaaaaaatatcatcttaaatttatctaatgtaaatataaagtttttgtagaaattcataaacagaaggtactttaaaaataagctttttcaagaaaaacaatgtagaatgatttttaaagtttgtacacctttggaaaatacaacttaaagtgttttaactggttttttaaacttttacaactagagcaaaaatctgagtccaatctattttttctttcttggaaagtgatgccttttcaagtgaagtatactaaaagaggttacccttagtgtattaataaagatatttaaagtataaaatgccacctcccttaaagattgtgccttggtttccattttaggacaagccttttggaacacttttttcttttcgatttattcagccgacaagtttatattgatatagcaataataaaggagaaaactcaggtaaccttatacttgaaatagaaatgaattctaattaaactattaccattgaaagttttaaatatatttttagataattatcaaaccccacacattgttatggagatttttgttaaatcatatttacattagataagatgttacaagctataaaagttgacattcaaaacaagaagctacagatgatttttatttttgtttgtgggaacctagtttattacagattaggttttttatagtttacagagggaattagtaaagcaattgtctcttccttattcaacaaaatttctcaaaaaatattaacgttcgttcctctcctttctcttttcttgccttttcatatggcacttattcattatcttgtagcaatgaaatattaaagccatttatcgtcagatgttcctacatacttcagtgaaataaagatcaattcaaaatgtacgcttacaaaacaaataccaaaactactgtatattctagcaaacaaaagaaaaaaaacttttggtaaaaaaaaaagcaattttttcaacaataaagtaacttccgtatcaaatgattttctagataatctttctttttttttttttaagtcaaactacaatttatacaccctgtatacaaacaaaatttttttacggagataccttcaacattaacaagcttttaaaataatgaactgcaaaattcttgcatcatgatgatcactgtatttaacaaaaaaagattacaaaaaaaaaattttttttcaattcaatgcatagaattacaatattttgttcatttggggagggaaatacaattcgatacgaaaaataaaccagtaattctcagctggtatttttttttttccggcatcttcaaaatgtctataaaagtctattgttttggaaaattccacttttggtaaaaatcgtttcatatttcatagaatgtgttttttcaataatagccgtcgggaatgttggttttttaaataaagaaaaggctcatatcaaatgctattatatttttcttaaaaaaaaataaacggctacaaatgtctatttccagtcgagaaaaattgttcttgtaaaccctttctctctaacaataatattactgatttgttttcgactgaaagaattatggccattgattttaaatctgaaatatgccgtcataattttttattcagttataactgatcaccgtaacatattcaagtcaaagccaaaaatcatctatatttcaaaatataaaattgtaaatattgctttaattattttaatgtaaaaaaagtgatacatacaaaaaaaccaactttcaatagctctcccaagtagtttcttatgattacttgactgtttttatattaaattacaagaaaaaaaaactctacaaaatgttaaatattttatcgaccatgttctgtacaaaattcagcaaatttttacttagtgcacatgcttcttaataaactaccgtcctttaaggaactgatgtcctgagttattctgtatattataaattgtataatctttttatgttcctgaaacagtaaatgggattttaatatttgaattggcaatagtaaatatataatagaattggtaaagtacctcttttttaatgcaattatttgaagtggagaaaatactataatgttaacatggatattgagtaactaatacagccgttcattaaccatatatatatttgtaaatgttaaactgttacagtttctaacaacgaaacagtttcaattttaaaacaaattcaaacatatcaaaatctgatttttaaaataaaacagtataatggttttattatgcatggaagttgcaagtcgattcttatatctaagagttgggtttggggaaactatcttcttccccatttaatgaaaaaaaaaaataaagttttctaagattaactgaaattagcttaaataaatcaccattagttgtacctacatattcttttttttctatactttttttttggtgttacttatattttttttataaattttttttctgcctaggaaattgaaaacaccggtaaaattaaatcaacaaaatcttcatatatctgtgatttttattccagtcaactcaattattgataattaaaactaaagttactttcgaggaaagatcaatactatggcatgttctgagatttgttttttttttatttatgaaaatttttgatataatatcagcatcctgcaaccagttaaaaccatatgccatagtttaatggacgtcgatttatccttattgaaaaaaattgtagaaatgacctggactattaactgaatatcgcatacttttacacattttcaaactttataaatttcaaaaaaagtgagggaaaaaacgattatctaaaatataaaattgatttacagataaaacacgttaattatgatagaattaaagatttaatgatgtaaacaactcaaatttatttatgttgctattgattttttttacttcaaatcggttaaattaataatatattaaccttaataatgaaatttcaaactaatactttttggttaaaatattttcctgttagcattatacattgtcatattaataactcgacactaccctaaccacaaataagacaaccaaatcataaaaaattcaatatatggaatggcgttataattaaatctactgtaaatatatctattatcaaaacaacagagatagcaaaagaaaataacatcaagctattacttattagcctattaaattttctaaagaacaagaatgaggagctaagaaaaggttttgaacgttacaatatagaataaattatatttatttctccactactgctacaatcaatgtgatactcatgaaataattttaaacatttcacaataaaattgtataaccgatgtactttttggaagttttttgttaaacataatgttcttatataagtaatagtttttgtattgaaatctactgctgataggggcgaagtttatgtgattcttatatttaacaaggtagaaaacgtttttcagcccagacaaaaatgtaataattttttcgaagaggtattttaacaatggctaaatcttagtcactgatcagtttaaatttctatttaaagtaagccataaattcttcataatcataaaaactaaatatctaatgtatatattctatagaaaattgtttaacataaatttaattataagtatattataaatctgataaaagattatccaattcaacaaaattttgatttgatagaattttaggaggaattggggtttcttgagagatcatttttgaagctttgtttgtatcaatattataattggcactaatattaaactcattttccatcacctttggttcattacttaattctttattctttaaatcatttgaattgggagagtttaccatgttaatattatctgtcacaagcaattggtcatttgttggaaactgtgtttctatatttgcgcccatggttccttcatacatcatatttctatcatcacttagtgctgaagaatttgcaaatgttgtttgtggaattttcgagtatttatgatttctatcaatactgctggaacgttgtctcattgtatttggattaatatttgtacgtaacttacaagatctcctactatcgttttcattttctggaatgtccataaaacttggcattaatgacaacacctctacactcgctacgctctcattatcattagaaatatcatttttggactggattagctgatgtgaaactaagggtctttcatttgaaaaatgattaagaacattcaatggtgatctttcagttgaaggtactatattactttgatcacccttttcttgcagcaataagttagctctcgataatgttgagattgaagaagtgtcagaaaacatgtcgagtagtccatttctggttgttgatgtgtatgatggtttatcaaacggagacttgcctttactgaaatcagcgaagtccattaaattattgtcttctgtccacgaaggaatatcatcaactttacctataccattaatattgggtggaatatattcttcaagtggtacaacaacctcaccaatattagatctggtagggctttgtatggtttttacattatttgacatatttgtctcatcaataaatgtatttcccatagtatttaaatgcaaattggaaacattcgacactgaagcatggtttagctccatattattatttcttgttttgacttgttgaccatatttagagtaaattgctggattttcaaaaaggaaactatattggacagtagatgcttgattattttgtaatggaaaatttggctctaaggattgtgatgattgtagtgaagatatagaaactagtgatgggacattatgatattcttttgatattttgccagtagtatcactatcaagaaatgccctgggaaaaatattagaggtatcatcattattattatcgtactgcttatcatgtgaatctattgtcaataaatgactgtcaagagatactgatgaagttgttctattgaccttacccttggttttgatttttctttgtgttaaccctgatgttcctgtatgagtgccgtttttacgttgttgtcgttttgaatgtatcctacatgttatttgggtaccgcaggtacaattttgtgcagtaaattccttagcttttgctcgttgttcttctttggctttttgggcttttcgtagtttctcttgtctcccacatgtacatgatccaggaggttttgcagatttgttctttcttaattctttgcagtaagcacatgttgttgagggtctaccctttggtttaatcatcataagaggttgatcagtatgtgtacatgttgtaactctatgacccctaatgcatctttcacaagcatatttgacaccgtttattagcaccatttgtacctatgtagtatttatagttaaaaaattattaatttaatgacaaacaaagcccatataataaatgtaaagttaatatataaatcaaaaaagtaagtgatctacaaattattaaaacactttggaacagtacaaaaaatccaccttttgtaacactttttatatttaaattaaaaattaaatgcttagcaatcatatagtaatatgaaaaggcagctaggtagagctgtaacaataaaagttttattgttgagttagctatgtagattactataatttttaacttcgttttggacatgactaagttttctttcacaatatgtcggccattctatccaacttattttctttttcttttttttttttttttttctttctttttttattttatttgactttattttattttattttttttttggcatataaaatactagaaagaacaaagtataaagagagcttaaaattagtaagttctatttattctacaactcagcagctcctgaagtgcactccagtttcatgatatctaagatttattttttaatttttaaccaattgcatgtgacattaggaagtgaagatgaactagaataatttccataggaatagcgaaccttgtaaattgtgataaatcaaaatgtataatgaaataattctacctattagtaaatagaaatagttggttttactagtgtatttgtttgatggagtatagctttctcagattacttttagcaatagcattttgattgtcatttagaaacaaacatctatctaaatattcaagtacaaaactatagaagaacaattagaacaacctatgagaaagaatcattagataattctcacttgtacgctgtgagtaggaaatttgtacaaaaaagtatttctctagttgtacttctttatcaatgttgttataagataaattagtttaatttgttggtgaaaaaagtttaataatagttgcaatgtgtaatttcctttattgattaacgagatatactttatacaactattagtgaacttatacatatttcaaaaatacttatttattcataatagatatataaaactgaagaaaacaatgatagcgcttaaaggtatttatttaaattggctttctgtatagttatcaccactcatacttaaagtttgtgaagatgaaccattttgaatgatttgtagtgtagaatcaacaaattctgcaccagaccatttttgatgtgtcaatatatcacagtttaggtttctttctttctgttgaactaattcaacatatgccttcataccttcggtttcaaatcttctcgcaacctcccaaaatgaaacaccatcaatatgtaaacctgcaagcgagactaattgaagtacaaacccttcgttagctagatcccatataaatgatttcaatgtttcgtctatgaatccgtgctttgaccaattgaaacttggggatagattataaacaaacttggaattttttaactccttatgaatctcattagcaaatgatttggcttgagttaaatctggtgtttttgtctccagccacagcatgtcagcaaaaggggcaaaggttttagaacgttcaatggctgcttccatacacccattaaacataaagtatccttctttggttcttggtgcttcataatcaaaataaatgtcttttgttggagcgcattgtttagcaagttgtagtctttcccttatgcttaaataatgtctatctttctgtttcataactttgttggttaaatcaacatatttattgtattcacctgacgttgtttgtaatttaatggcttcatcgattgtacagagttcatttgttccataccactcattttccgcgtcactaatttggttttgtgggacttccttcatttctaaatcaataacggtctcactccatgcatttgtatctggcgtaattatacctttgatatatttatgatctcttggatcactattactacttaataatttactattgcaggagtcggttcttgcaattattatattctctgttcccataacgtcccattgaaatcttgttgccaatagtctagttaaatgcgtgcttgttggtacaagaacggttcctcccaagtggccacatctcttcccaccaactaattgatcttctaaatgaatcgctgcagcacctttttcagcaaataacttggctaacttcattacggttgaagggcctccatgccccatgtctccatctgcaataattggctttaaataatcaacaaatttttcatttccttttgttaatgcagccaaccttgacttacggtcatgtaactgctgtgctttaaatattctttccacttgacgtggcaccgtgtcatatgggtaatcaccaaagtcaggtgatacttcgtttgtggatccgacaaatgtcgaggaacacgcccatccagaaatataagcagcaccaatatttttacatttagctaattgtgacatctgtactggatcgataattccaagtgtatgtaatggtaatcgtttttcaaatctattttctaaatcttcaaatagttttcgtgcttggatagatgatgcatatttaactttattgagtgattgtgaacccctatgtttggcaatatcttccgctgtgtacaaccgtttaatatccttgaaacgtggtgagttccaccaatcttcaatttcttcaacttctctctttaaaatatctcttaaattttggttcatatagcagcgtctaatatttttaaattttaaagataacatctcttagaatgtttttttaattcgctactacatttacattttgaagaaagcacttcattctgaatttataaaacactaacttagcaaaagaatttatttcttattaaatatacaaacatatatatatatatgtgtgtgtgtgtgtgtttatatggatttttatttgttaatagcttgttgtatgtatatttttagcatttgctagcttatttaaaatttctgcaccctttaaatttccccaatagctttgaaatttcttcctaccctaaaattcaattaaaagtattgttcattcattggggcgaaaaagaaagatcgataaagagagattacaataaaaagcagccatataataattctgagaatattgcaactctctaattgcttgacaaaaaaagtactatgagagtttatttctcaagttacataataatatggaatgtttctaatgtgattggaattgagacgaattttgatactttcaaatcaataatatcctgtgatgcgagatccaatagtgaaaaaaatgcattggcagccaattgttttgtcatgggtacaaaacccttcgtttcaaaatcttcaattttgtctggaataatataattgaaaggtaatccattgtttagaagagtatcaatagatacatctctttctactgtactatctttcatctcacagaacttgctgtagagataagaatagaatttttcgctttgacaatttcttagtttgtccagatttttttggattttattctcaggggtgtccaataaactcttatattgatctttttcgtttattatagtattatttgtatttttagacaactttaaaacatcaataaagtctgtttttcgttgtgcagaattgttagacgatgttctggttgaataatttccaatactcgagggtaagagatttaaagggtgtctcataaactctaaatcattttctattgattcagaatatggaattagatttgcttcgtttaaatcttcttcaatttgatctaaatgaaataacatattattggcaatactttcatcttgtctaaaaagttcatgatcttcattatctaaaaataggttacttctttcagaaagattaaccaattttctacccgtatcaatattatcaacatattcatttgaccgagaagaggaatatggtattggtttatgaaggaaggaatacaaatcctttgaaagcaaaaaattccagcatttatttacgagttttgttgtattatcgttagaaaaaaaaagttggcggccagttttagagatatttttaccaaattttcttttacttctttccataatttcaacataagcctcatggtttatttttagtgtttcggttaacatactaatttttgaatcaagtttaatcttttttaatatacccctattcttatgaccttcagaatcaggttttctctttctttctaagtttgatgtagggttttgattgtgctgaatcttggaggctattttatgttctgtcttatttgaagaaatctctaaatcaaaatttataactgagtcgacttcttcattagtaaaattagtttcttctccaaaatatcttgcctcttctctaaaacgaatatcttggttatttttgtatgttagtgaactagttgatcttgtggtcccttgttgactgattatatcttcaaaatttaaatctaaagagaaatcaacaggaagttcttctaatgtgaaatttctgacaacattttgatgatcagaaatatcttcacttggatttggtaaaatattgtaatttctgagttcatttaaaaagtcttttttctttatctgcaatgattctattttttgatgattccttatgtctattctagttagaaaaagctcaaaattttcaatatcattaatattaaatagattgtcatcctgaaaaaaattctcagcatttagtattacgtcatgtttgtgttttagtgtatttagatattttctagaaatgcatcggttttcgatgactctttctttacttgcgaacgatttatgtatttgagttaaaagtacagataaatcttccaaaacaaagtctgactttttacagtaacacagtgaaattccatataacaaatgtgaaatttgttttaattgtaatggatgtgaatcagctttaattaggtgacaagttgttggtatagaaacttctagaatatccttttttgatacctttgtccaacttcctttttgctttggaaataattgtcttttgtttagtaatgatagcagccatacagttgatatattttgtttattttcgccttcaaaattgacatatggcttgaaagacattgcagcagcttatattttgcatatattttgtttttggctgtgttctcatatgtttaagaattagtttgcaattaagttatatatttaaaaactatatagccgccgatattacattttatattaaatgttatgttttttttgtattttatggaccaattttttttttacattaaatgcggaattcagaaatctatatactatcaccagcagggattcacaaaaattcctttagccaacaaaaaaacaagaagtagcaggtaccagatttattcctaggataacctttatccaaaccttattgcttattttttcttttaaaactaatctttactgcatttgtgttctagaagtgaattaaccaacattgtttacataatggaacacgctcaatggatagataattttggaaagatttgatggatatatgtgaatacttctaaccatgcctaaacatgaactaacaggcattataaattataataccgttaaaattggtaaaattggtaaaattggtaaaagaaaaagtgattaaaagataggtgataataacatatttgttctaatgtcaagattacattgaggtaggatatgaaatgcaaagaaataaattctacaatttctctcttaacatttggtctacttatcttttatattcatttatatttgtttttgtactttacatacaaggggctgaagaattttaattctaataaacatattaataactttttcttttaaccgtaatcagtagctatagcaacatcttggattgggacctttatcggtcgagaaatatgtcaggattaatctttaatagttccttgaacaagatctaacataattattattccttgagaatcctctaattagtttcaatattttatactaaatactgcacttttgactgtacgagtttttttttatctaaacattcaggtgtgacttgaaaggacttcgtatcaatcgaactccagttagattccttgcaaaatttttaaaactaacagaatataatatatataaggatttatcctaaataatataataaaatttcaagacgcacgacttttggaaagtattaaagatatgtatcaaggagttatgcaccttaaagttttatgattaacttagttactctatatactagatataaaaagaatacaatctgaaatcgtagttaaacttagaaggccgcaagagcagagtaacttcctcttatatgatactctgcactacaaagattttacacggttgctaacaatcttaaaaattgttcatgttgtatgatattattttccaaaagtgtgtaacttatcgttagcttaccaattatctgtttctaaagtttttgtttaaattatcttaacaaaaattatgaatattgacatgtataactatttaagaatcataaatcgttgattctaacaaaataaaacaaatatacatgtattaattatttttgttattttcacatttattaggttctagattagaaaaagaggaacattatacagaaacaatattgctgacagttaatagtaaattttacaaatgtttgcttttcaggctaatatcttaatattcctccttatatagtacttaataaacttaaactcatgtaacaaatgatttactattcttttatgatctaattgttgaaaattaatgatacataagtagattgaataaaatagaaatataaaataattgaagatatatacaaatatgccatgagtatataattttgtaagttataatgatgcacaaattcagaatatatctgtgttttaaaaaggtttattattagtattcatatcaaactgctttaatggattagttttgttagtcacctgataaatacattagctattgcaaaggtaattttccattttttgagtaatttaatttaagtaaatataaatttttaagttctattctgtattaatagaagtttaatattagtgtctataatgtaaatgctctaattaaaatggtgattttgtacaaattagaaaattaaacatgatgctcttggtaaaggtggatcacattagaaatagtaatagtgtttttcaaaatattgaaacatctagaatataaatttttatgataaagaagattttttgcgggtttaatatcctatatttgaagataatagtgtatattctacgtaaaagggtgcattgaaatattaaaggttagttaaagatctaaaaagaataagtgcaaaatgttaatatcagaaatacaatttaataagatgttagaaaaaactaatctaacattttaatgtacctttttaggtatgtcacaaagttgacttttttttagtcattttaaaagaatgtgataaaagattcttcattagtcatgtttctataaataataattgtaggattagacttcagaaaaatagaaatggattttgaaatgtggagtaaattatcatatgatatactatggcatatctttgagatttagatatttctgttaaattcaaaaatgaaatgatagataattatatcttgatatataataatagtaatatagttgacaaaattcctcttagattgactttaagtaaaataatgttatctgtgaaaatatattgaatcttattgtaggtagtacaacagtggtagttttttgtaccatcatatttatcattagctaaacgatttttgaaagataagcattcgtgatgtagctcttcacaagataaaatatctcagagttgagaaaaaaatacataatcaagtggcagcattatatatttatggtcatgttaaatattacatagtggaacagtatcattgggtgtaacaaataataaaaaaaatattctcctttaaaataaatttaaattaatggtagttggatgaaataatttagtgaaaaaacaaatatgttgtatttagaatgtaataagtagaagaaataaaggggtttaacaaataatcaaatcaaataggcaagcaattctaaaataattatatggattgtttaagcataaagaacatcttttgtaagcatgttaatttgttgattgcaaccaataaaatctgtgtagttttctcactattctgatgatataccagatatacaataaaaatatagaaagaatatattaatattgaaatataaagtagtaatatgtacttataaattactgaaatgtaaaaaattcatgagtgctttagaaatatagagttattagatagtaatagtccagcaaaatggcacagactactttcttttcaactgcaaattaaatttatactgttttatagtatatattactagaacatgtaaatcatatgagatttaaaaggattggctgcaatgatgaagctaaaaatgatattaaagactgatcaaatactagttcaaccttgatatagaaattattgtattaacatttataatatcacaaaaattgttattgtgtgaataaggatagtcaaagctgagaaggattgataaaccatataatagggataaagtaacggttcattatgtgtattaatgataataataagtggattcaaccattagctaacaataatgtaacttatgttagagctgtaaaaatatattaattaaagtgaaatgctatgatttaaagagaaataccggagaaattttaaggtactcattagttgattttgaaataaatatatatgttaaatcacggtgaattggaaatggtcaaaacttgctttttgatttttactttataaatttcttatacataggataacatatactttaaaaaaatcaaaataatatgatataactaaaattcttcagttataaaaaataaattggactagtaagtaaagaatgtatttcaaattagtatatataacagaattcttaattttgtagatagcattttccaaaagaatatcaatgatgtatggagaaagtattaatatgttctatagaataactgtgtccactgtataaaaaccttccagagaactttatatagtaatatggttgacacttttaaaaattaatgaatttctctgagaaaaactatagataaggttaaattgtttcactacattattgaaacctattgaataataaccatacttaatcaaagcatcgctgctattttctgctactctaaggtttatcttattgtccatgacaaaaatgcatatgtcctataccaataaattatccttcaataataataaaagaaacatttcttacaaaagatataaaaacaacatacaaatcaataaacaaaatgttatttaaacttaacaaacttatttactattttaccttcattacaaatatacaacgttcattgtaattaaaaacagtattaattatatcattctgtacattttgaaccaagcacgtgcattgtatatacttttttacacatgttattatcatagtttattgatctttttattttatatatccgataatactttaaactactttcaccgtatataatgctattgcgaaaattttatgagaacatagtaatgtacgaaatatatgtgagtaaccctaatgagggtttgggatttaaaaatcttacagaaaaattgcttatttttattttattttactttttccccatttgaaagagaagagatattttagtatgaaagtaagcaaagtaggtaaggttgagttatttatacaccagtgcacaattgtgatttagtatggaacatatatgtaaatagtgaggtttagatgaagagagatatataatagaaacgatattttattagcaaattggcaattggggatttcggagggcaacatttcccccctccccctttcaccggatcattcagctactaggcagttaggaagcagtgataactaagataccacagtcctatgacttttgtccatcctagcaacagacatgttgttcctttagataatatacacataaactatatagaaggatagctataaagaatattacagcacccagaaagaaaaaacctggatatcgggtactaaaggtacagatgataattgcaattaatcatgatgaaatcaagatgcacgcccggagttgagtgagtcgaatagtacccgcaacaagcaatcaaaaaataaatatgaccaacgtttatagaacgcaaagatggaacaaactaaataaaagaaagtacaaaaaacataaaacattacagggaagtcacaggaattcctattgatatcgagaacgtcgtaacccagtatgatttgttgataatttacacaattttgatgacaatgcataaaagaagagcagagttgtgtgaaaacagccccaatacgaaaaaagatttacgttcctacgactgtttgcctaagatgatcattaccctcaccaccattggtagaatcaggagccttgaacagagccctgtagagaacaagtccacttcccagaagtatcgagtccttaaacagttgagatggatcaacatgagatactcgggccagccatcaaaacactacatctatttacaaaaaaaataagttagaaaagaacggtattaagatagagcattcctttgatttaggagctcttgtatatacaatgggtatcacacaaagtaaaaagatcatgaggcgaggaggaaacatacattaggtaaacgaactggacaaaagttggagggtaggaaaaaaaaagagcgctctttattttttttttctttgtatgtttcttagttaagatgagaaaaagacactaaagcaatcacacgatagcgaattaaggttctaggttaatatacaatggacaatggacaacacattagaaaatggatgtattgttagtgggattaggaaagaggaataagagacataaaaaagtagcgaaaagaaaattgctagatgataataatacagaaaaagtgaggttaataatgagattgaaaaagtaaaatagcgttaataatgtggagtagccataatggatggaagtagaaaatttggattgaattactgaggtgtgagagatactttttttagcgggctatatttttttttcttttttttattttcatttttgttataactgttttttattataacatttttttttttttattttattttagcagtgcactatttagataaactgggactagagaattaataatatgagagatatagaagaaaaaaatagagatgaaaaaaaatcaaaataaaaagtagagatggaggaggggatggtaaatgaaaagagagagaattggaaacgatttaggatgttgttcattgactaaccaaccaatcattcagatatacattatagcataagtatgcctcttagatcatgaagcataaaaaaaaaatactacgagatataattgacttttgttatgccacccagaggaacagaaccaccagttccattaagatgtgcaaattataagccctaggagtatcttcaacttgttcaatattttattacgaataataaaataaattttgatcaggtaggaatagaaccaccagttccatctgacaaagagagccgcgagtcaaacaagaatccaatattcctatgtcaattattatctctgaaaaattgtccattaaaaatctcaaacaccattttcctatttcttggcttgtaaattcaactacaactgtaaaatctgaaatcatgtaaaaaaaaagcgcctctgtaaaactatcaccttatgagtaatagtggaatcaagaactaaattcaactaataaaaaatatcttcctcaaatcctaaatttgggttaacaatagtcttgaacttgcataatggcaatccacagatcctattgtattcactctcttggaatagtaatggaattgaataaaattaaacaataaaagggtaaaaaaatctccgaaaattctctagtaataaaatatataaaaagtctgcacttgctagtatcattctcacttgttggttgcatatatgtcacagcatatatatatatatatatatgacctatattgtcagtattcattatatcaggataataagggcttgtatccacccatctacaaaacatttttgccatgactgctattgagtattagtattaatattattatcgtatgtctgttagtattgtaaagtaatgtgtcctaatcccttgggagatattcactcatcttaacggatctttttaccacatgtggtaacaccactggatatacaagaactactatgccattagaatacgctatcctaacacagtccctccaacttagtttttctgtaaatagacgggtccctttggttgaattcctagcactcacatgaaccacccactctcgttgattctttcatgtaagaaatggaatcctctataaggtcactgtcaaagtttctaattctcctagactggatttttgggtatgtctcttagctacaggtcgtagcccaccactttttttagtataaaggagaacaattgttcttttaacatttccactatcagcttcacagatcaagctatgtattattatctccattatttcattattttagaatcaaactgagaaattcttttttttcaatctttttctttgtgatcattctgacatgttatatattttcaaaattaatttactttttcccttccacttttgttttctaatagatgttggacatgttcacttattggttgggtgtgacaggagctattggactggtttctttgtaccttttggaagaaaatgtgtatagagtaaacacctattcctttaaatattattttgtgtctctttcttttttttaaaaataaaaaaaattaatgtcagtgttttcccgtaatattgaagaagtgacacaaaatggagtgctcaacgacaaaataatgatttttgcttttattgcattttaaaaagaaaagacacagaatcagggagggtaaaaaagaagaatgggaaatgtggtttgtaaccgtattacttttaaaaaacacatattgttttttattatgccagagaaaacagtaatgatagcagcaattttgcgacaaagataagagaaatttgggattgaagagtttgtttttgtctacagctataagagtttacaccattaagaaaagcttgctataaagttactttattcttctttttttttttcttttttcttttaagaatcttaacaagctattttggatagaacaaaagttattacgtttgttattccatcctgtatgattagttgacttttaaatgtttaattagttatatgtagagtctactgtaattgtacccttgagttgttatgtagttctcagtaatttgaacaaatgatttttttaaggcttctagccagtatttttagatttgtttttgaatgttgattttgaatagggcaaaattttgtgtctaaaattagaaaacagacattgcactttaagctattaatcaaataaaacacatgaatgaaccccttccattttgggaattatgtaaacaaagggaacaaaataaaaagtggttacaataaaggaaaagttactatttctgttcatttttgttcactttaaaaagatattactcggcggctaattttactagttacaagatgcaagataaatctgcttccagttttgataatccctaaatcatattattgtttgtgtttagttttagtcttacctatacctatatatatttatatatataatccaactaagagtaaacaaacatcggctttccaaataagacctcacatcttgaaaagtattttattttctttaatcttgaccttaattttctttttcctttcattgtaatatcggtatatttacatacatcttactcttacatattattataatactcaaggttttatttctaactatattcgaactgactgacaatttatcacaccaagtccacattaattattttatagaataataaatccgactgtcatcaaaagtttctgtttaaatgtgaagatacgtctgactctagtcaaaataagcttgttcaaatagcataccaaatactttagacataatgatatggcgaaatttttatgagaacatagtaatgtacgaaatatatgtgagtaaccctgatgagggtttgggatttaaaaatcttacagaaaaattgtttatttttattttattttactttttccccatttgaaaaagaagagatattttagtatgaaagtaagcaaagtaggtaaggttgagttatttatacaccagtgcacaattgtgatttaatatggaacatatatgtaaatagtgaggtttagatgaagagagatatataatagaaacgatattttattagcaaattggcaagtttaggtcggtctgaaagtttgtaactgatgttttttactgtttttgtctgtttttatatatctgggagaaatgcagacataagaaaaatctaatgagtgtttcgtaatattgaaaattactatgacgagttcaaaaataaaaaatcatttttctcggactgtggatcttgacatatttgttccacttaccgacatttcggaaaagccagacaaacaatataataatgtagagattttttttctttctttttttggtgtttttcttttttcgcgttagtaaaatttttcaaagatctttgaaaaaccgagattgaaaattagaaattaagggataataaaggtgtggcgatatcgattgtacttttcagaaagagaaatattatgtgtgaaaaagaaaagtaaacgtttttgttttctgttaatttttttccaaaaccgacatttcggatacaagaagaaaaatatttcattcaagaatagatcaccgacatataatttttctttgttcttggtttttcgattttcctattacttggcactttttttttcattttgaaagtttaattttattattatataagacacttgagattattaaaggtagttgtaacatatctttcttcaataagtggagaagaaaaaacaacaaacttttaaagactgttatttagagaataatctattttatgtgcaactattaatgattaatagcatacgagaactaagattatgtatatgaaatcatctgcaatttaaaaagttttattatattaaaaaaaaagttagcatattgtaattctgaaaagggaatttaaattaacagctcaaagatactttcaaaaataaaaaaaaaagtattaataactttgacttaaaagcattaaaattattatccttcatacgggaataaataaataaataaaatgaaagactatgaaaacaatatagaaccagtttcatcgttgcctaattctatttcctccattaaagatgatgcttctatggcatcacaactacaatctgttacttcttcagatgtgaatttaggccagtctatttctagtgactatgatttaaagaataaagaagatttagatgacattggtataatccatacaaaatccaatcatatcgatgaacctgaaatatcagctcctccttattcaagatttggtcgtccatctaaactattccttgtattgcaatgtgcctacacgggttttttttctagtattgctggtgccatatattatccagttttaaccgttatagaaaagaaatttgatataacagaagaacaagttaatattactgttgtagtttatttcttattccaaggactatccccaagtatcatgggtggtatggctgattccttaggaagaagaccaatactactgatatcagttattgtatattgtggggcctgtattggattagcatgttctcaaagttacgcacaaatcataattttgcgttgtttacaagctgctggtatatcacctgttattacaataagtagtggtgtcatgggtgatattactacaagggctgaaagaggtgcatatgtcgggtatacttcaggttttcaagttatagggggtgctttcggtgccttaattggtgctctattagcttcgagatggaattggcgagcaattttttggttcctagctataggatcaggtatttgtgcagtgttttcaattttatttttacctgaaacaaaacgtacattggtaggaaatggttcagtaccacctaaaaactggccaaataaatcccctgcattattagtacccattattaggcgtagattacatatggatgatccagattatgagactttagaaccacgaatcaaagtaaactttttggctccattctccattttgaaaaatccatggattaatatattgttatttgtggctggcttccaatttgctatgaacacattacatcagaccaccttatctactgttttaagtaaaacatatcattataaagtttccactattggggtttgttttctaccagcaggtctttgtacattaacaagtgttgttacaacaggaagatttctgaattggtattatcgtaatcagatggcaaaacataaagtatggctaaaacaacaagaggaaaagttgctaaaagaaaatcatactattgaaaaagttaagaacataatagataacgatccatattatacatttaatgtggttcgtgttagactagcaccagccttttttactttgatattgagtgcatgcggatatattgcctttgggtggtgtgttaaagttaaagcgccattacctgcagttttagttgctagtggatttggttcattgttttctaattgtattttgacaatgtccacaacattaattgtggatctatatccatcaaagtcttcaaccggtactggatgtttaaatctattcagatgctctctttctgccatttttattgcatgtttatctagaatgagtgacaaaatgacatatgggggtgtttttactttcatgggagtatttagtgctgctgcatcatctttactatatattttagtaggtaatggtaagaaattggcctttaatcggagaaaagaagaagaagaacaattaagaaaattcaaaaaagagagggaagaaaaagaaaaaatagagaaatttgatgtatgaaatatgtagttttaatatgctattttaattttagggtaattttttatagatatgttcaattttaagtattattaatatcattacatcaagaatttttgatacgactatttgtgtattgatatttagtgcagaccctgaaaagaagactataattgttgaaaggatgaataaaaataggatagtatttgtttttataaatacctatccaggaactttttgttatggcttttatttctttagttaggagaaaatgtatttgtctatatatacaaaaaactagcagtaaacaaataaagataaattatttatgttctctgtcaagataattattggagatgtaataaatggatctatctaaatatattgatgataattaaaatatctgttcaaatatataacttttttaacttattttctttatgatttatctatggacatattgtattcacataaatagtccattatccattgtttatttgttttcctgtttatttgttttttttgcctaaaaatacgtcactgacaaaaatagggcttaataatatattttttcttcgaagattgtttggaaaaagagaagtaggagtattgatgcaaatattaaatttctttgaattaatgtaaataccagagttcttcgtacaattcataatcctgtatgttgagatattacccagactcaatgaaaattttgtgaaaaattttttttcaaaattaacttcctgaaaagtataaatagtcaagatatagaaattagaaataatttcttttactcacgactttatatacgtaatacatattttgtatataatataggtgttatttaaaattgtgagcgattacttataaaaatacgattcataaagtttcgttataacttataggttattactccacaccttttaaatttcaacactgtgaaagttattatataaaaaatgaatggattatatcaattagtttatattgaaacacttttacttaatactatataagataaaaataatatatcaaagtgctggaatgatatattaccggtttgagtaacatgtaaatatatcaaagaggaaaaatgtttgttttgcacattcaacattatggagataaaatcaaacaaaatcaaaataaattaatatattatgaaaaattgccaaaaggtaaatatatataagtagacgactttacttattaattttcaaatctggatgaataagttatatacactttatcatatgtttcttttgtatttatataattattaattccgaatcaaaagatcgagggaaaattacactgcatatcaacataataataattcacaataataacatatagtatgatcaccgacgctaagaacatgtatactaatattattcatctagaggacaaagttattatttaattccatatggcttatattggagtatttatatttatacaaattgagataattcatctatttttttttaaatactcttatctttgttatacaccaaattagttacaacaatattactatattttgaagttccaaaattacaaattacctttgttattacaaataaaatttttattattatgatagatccatttaacgtaaatttatcaactaaatcaactaacgacaaaattgctaataatgatggtgattttattttatttttatcaaagattaaactttttttactccaggagaaggacaaattgttgttatggatataaaaagtgtggataacctttcataaggccgtgatattgttaagcttgtaaataattctagaggaaatactgtttagtcaccaattaatgtcaaactgtagtgaatgtatactaaatttttttaccgtattggcaatatatgaaactttgataattacaaactcaaataaaaataagtccacactacagatgtataaatttttgtcagttgtatgcaaaaaaggtgcttgtgctagagattcaaagtttggtgtgaagggatatcagtattacctttgcagtcaatgctttgatgaagttgacttggaaatatattatttacattatctatttgtactgatacttcttcttttattacttatattagtcagtcaactgagaactggaaagaaaatgtattagttttgctagtaattgcctgtttccccctttgtctttttcatctaattctctgtactgatattgagagtaacttacggttgttaagttctaaatatgtagtatatgtaccttttagatctcgaactttattaatctggtaaaattatgaattagcaggttattgcttaatatcaacataaaggtgtaaattaaaagcttctaaaatatgatttaatgtaattttgactatccaaggtactttctagtcatattcactttaattttcaagcctttgcatccttgaccactttaatcttctatctagacatttagttgttacataatactttgtatatcgactggattctagctaaattcttaataaaatgttatatatataggtttcctgtttaaaaaacctaatatatatcaaaaaaataatagagttactcagactaactatgaacgtttatggtccataattagcactttttgaaactgtttactaagatttagttcagttcatttgttactttttattactctgatttttctattgtgcaacagagtggtaataataaatttagtgtttatctcctgatgaaatataattcatattaacaaaacaaaaaaaaaaataaagcaaagattgataaatatcaataaaattaatttacaaactaccacattttaattaataaatgtattttattttaaattataaagtttgctatactgcaattaaataaacaaacaaaaaaataataattgaaaaaataaaaataatctctttgaaagcacttggtaaaaagatataaaaaagagtttgaaaggtactcatatataggagtatagatagcagtcaagaaagaagatgaaagtatatttccatgttataataaacacaaatatttcaaaacacaatttatgtttcagtaaataagtatataaaataatagaacaaggagtatacaaaatcaaaaaaaaaaaaacaaaatacttcgaatattaaaagtttccttattaacaacttttctttcttcttccttttaaatgaaatacaactattctctattaatactattcatatttctttgcccctttttaaaattagcagatactttacccacaaaaagtttacttaaggaaaaaattagcaatttagtaactataaaagaggatacaatacataatggcactaatgatttgttactcgaagtagatgattcaaaagaccgttttaataccgaattaatgaaactttataaaatcatcaccaatacaaaaaaaatactcagtgataaaaaagaaaagaatcaaaaggagacaatcaagacagttcttaacaatattatcatcgaaaccaaatatttattatccaaaatattaaaaaccaattcatttcaaaaagctactaaacatgacattgatacaaactctttaaaacatttatccaaacttttatatgatttagaaattttagatacgtattatgaaaatgatatgatatatgaaaagaaatattggtatttacaatttcttggtgtcagtcttgataactcagttctagcttatattaaatataaatattggtacattgaccattataaaacaacatttactaaatacggtgaagttccaaaattaaaaaatttggcaagaacagttagagagataagatatgccttagattccaaatttgcagctttagaacttattggtcgtaaagacatgactgaattggtttccattgtcaccacaactgtcaaaaatagcccaacattagaaaacgatatcaaatatctacaagatggtagtatcaacatcctaaagggactggccttcacaactatgtgttttgtagctaatttaacattctgtacaattacactaggcggactcctaagtgttgaaattttaatctggttagcaattctttcaagaacgataactgtagaatggtcatgatatgtatgagagaagaaaaaagcaagaaacaaaaaacagttttagaataattttaatttgtattttatcacctaagaatctcaattatatatgtaatacatatacataatagatacaaacatctatcttgtaaataagcatagcctactccaatatacctaaacaccaaacactagtagcaataaagaaaaaaaacttaatgaaccagaatttaaagagaaaagacataaaactacatctacttaagtattcgtttataaaaatggtctaactaattcgccgtcatatactgtgaatggtaaatctttaccaacagctgcaatggaaagattatctacagttagagtttcatcttttaaagattgcctaatagcctccaccccaactttaatcaattcattaacatcttcaatttcagtgaaatctttcaataccctttctaaatatgtcttagaaccttgtgatctagcaccaattgcagatccatataactctaatatattaccggaaggttggaattccaataaatgaggaccgctgttatcataacctacaaccaacaatcccacaccatatggtctgccaccgtaggattgtgtattcttttgagctttatcagacaatagatgccctgctttttctactgataattttctgttaaaaactaatttagagtaattacattgctgtcttaaataggtacttaatactcgagcatcaggtgctagaccagctagggaaaggcctaaatgttcatcacatttaataatctttttctgatatgatgataattcatcagcatttctcttcaatgcgactaggactgcatgtttagatgaccttagtccaactgttacactaccttgcttaatagcttccaacgcatattcaacttgaaataaacgaccggtaggagaaaaagtcactgtatcaccatcgtaattgtttctaaacatttttgttccttttcttagtcaatgattaatggatttgtatatatatctattataataggaatatagattgtttttctttatggatatattatagggtacaatatatattgaagcaaagcactaactgtatgagtggcaaaaaaaaaatgatatgggtggagtcttataccaaagtaattgtatataattaagaagatccaaccacaatacccaaaaaatctaacttcagaaaggttagtgtaatccgtcacaaaactatgtttttatacatgtaaatacatggattcaagatattattgaactttttactaaaatattatgcaaaattagcatacaccactactttattctatatatttttttttttcaattgcttctttttcaatatctcgaccagcttcctttcctttttcatttttttccccgattgttgttgttgctgttgttattttttagggttgtactattttccccaacacaggaataaatttatttaagggttgaagtgaaatttctttttctatatggtaaaaccagttagggttatctaggtttttctgtaaatgaacatgtttcgaacattatattataattgataacaaaggaatgtcactaatggcaacaattattatagaattattcttaccgtcaccctattacgctgcaatcaacagataaaggagaacgtaattgacatatacaaaatgaaggtataatctatgttcttaattcataatatattgttatcctagaagagttaagcatatttgtagcatataaacttgaacaatataatgatatcttaagaagctcctataagagggactagacaactttatgaacaaataagcaagaagtagactatatatatatatatattttgtagatgtatcaactctttgccctgtttttttttttataatttgaatcttataactaaatttattatctatttcattttacaatctccaaatttacaactgtaaccaaaactggagacgttaaaatatatatatatataacaatatcatttacaaagcaatgaaaaacactttaatatacacaatcaactaatgatgaaagcagtgtgttcaaagtctttgagccaaatcaaatctctgttgatccacatatttcgttagagctctggagaggcggaatgtatcttatttcatgcgacatttaatatacaaaataaattccgcttgaaagccttgaattaaccgaagtgtaaaaagatgtaatacacaatatattccgaaaaacatagtaaataattatatatcatacatcatttaaaaactacaaggaatataacaacaacacagaaataatatatatacatatatatatacctgtatgtggagaaggaagaactaagaaggaaaagatttatcatagatttttctatttttatttttatctgtaacgtctatattcgaatacagtgtgtcaccagttgtttgtatttttattcggttaaatttgtttatcctttatttagaatattacttttagtatgctagagtaatggtgtttacttttatgaaaaaatggttactacacttattttactccactttggatcatataccaccatttttttgggaggtattaaatgtcttaaccgacatatatttcttctggttttataaattaatgaattatttaagacccaaatcaagagcaatttaccatgaggctatcaaagaactagaccaatgtgaaacatatgacttgtggtgtcataatgcatcaatggtagatgagatcacaggtgctaatctgtggagaagaaattttttttctagaagatatgattttaattctgttttggaacagttcactatagttagtaaagctttagaaaataatgatattgagttattaagagaaaaattttccactactgggccttgtatgttaaggaatttcgcaggtattgtagataaaagacttttcaccaaatcattattaggaacaaaattattgattgaacaatatttagaaaagaatttagaaggtttacaattattaaatgatgaacatgtaccaacgtcgttcttccaaaggtgtaagctatctttggggaccactgcattaatattgaaagggggttcattatttgggttatttcatctcggtgtcattaaagggctgctggttcaagggttaatgccaaatattataagtggtagttcaatgggtgcatgtgtagccagtttttttggttgtttatcaaatgatgagattgatgaattactcgacgagtctaacggtatattaaatttaattaaagatgattatgagttattacgaagttgtggatatggaaatgtagaacagcatttaaacttaggttcattaatacaaaatttgattcatcacggatattcacaggatgtttacctttttgttcaatttgtaatcaagtatattgtaagggatttaacttttgaagaagccttccaacagacaaggaaagtcttcaatatcgttattcatccaacagataagtcatgtccaaacctactgaactatgttactacgccaaatgtgttaatacaatctgctattaaatgttctttaggatcggatgttattgataacgacacaatattgtattgtaagaaccttgacaatgagattgttccatttttaaatgaacagaagaccaaggagacgaaattcatggctccagaaaaggcaactaatgtagatgaattggagagcccatatacaagattaactgaactatttaacgttaataattttgttgtttccttagcaagaccatatttagcaccgttgattgtcaatgatttaaaacacgaaattaaaacttcaaaatactattattataaacattatccagagacagaaaataatatcaacttacctgaattaggtatacctcaactaagttttacagagatggaacctttagcattcaaatttaagtatcatcttgaaaggaaattgaaaaatatcatgacgatggagtttcatcatagaatgcaggtactgaataatttaggcttattaagttcatggattaaaagattaattattgatgaaagtacacctagatccgccactgaaattgtgattgtgcccaagattaaaagtttatctttgactagaatcattgagggacaaatcgacaatataccctactggattaaatgtggtgaacagagtacttggccggtgttacctttaatccacactcgctgtacaatcgaatttaaattagatgatattataaaagagagacgaaaatactaagaaatatattatttcttcacacagtatgatatattgcaatcctacatatatgtacctacatacatacatatatatatatattaaactaatgcagttgaatatgagatagagtaaaatatagttaaagttaaccgtaaaataattttgtattctccttttcagttaaatataaatattcgttctctacaacatgaatagtggtattactattattaaaccaatctactccaccccttgtaatacgtaaagtacctgtcacgtctttagcatgtccagtagttaaaggtcttaaatttaaaacaacagttgatttatgataacatatggttataaatctttgaaattcggtaaaggttttatttactgtactatttaatatgccacctttgaatagatctacattattgtttatcatcaatattttacacttttgccaaatgggattaataaaattattccaaagttcatttgaagtcaacccagataccaaagacaataagaattcaggttgatccaaaataacaatgtggttattattaggaatatcatttgtcaattgatctgtaattgattgcaacaaagctaatttattattcatgaatttcgggatttgtttttgaacaaaatcggttaaacagtctatcaccgtatattgatttgagtttatttgtaatttttgaaaactagataaataatggttttcattgtgcacaaaagaaataatagtgactttattaagatttgttatggaatgactaaatgtacttctactactactactattactgctactactattactgctactactattactgctattacccaccttattaccattcaaagagtacgatgaacctttagtatgtgtttcaacaagtgcattaataagccattgaggtcctgaagaatgtgttgaagtgatcaaaaatagtctatgaggatcattttccgtaacagtaggaataacactctgatcagaaaaaagtaccaaatcctgcctttgcgtagccataatcaatcaattaatcaatcaatcaaaataaaaaaaaaaataaaaaataactgtaaaatcctaatccctaaatcctagttcctttctctttctagtttagtgatattgaccttgtaaagaaaatgataagatatacgtacatgcacctatacaaaaatagctcacctcttcaccgttctcccatcgatgaatgtgtccctacactttttttactcagagtataagaaacttttgaaaaatatcgtttaatctttaataaattgcaccaaacacccacacaccacactatgtgcagcagtcaaggattactcgatgagcagaaaatttgaaaattgaaaatggaaaccagaaaaaaaaaaaaggaaaattaaaaaaaaaaaatttttttttccacctttcatcacaatgtttgttctaataattgaataagtatttcttttacttaatgtttactctgctatttccactacatctcacttctaaggtgtgttttaagattcgccaattagtatattttgaagagtggagaagataacaacccaaagctgcaataacatattttttaatgaaaaaaatgttttcattaccaatcttaccagcagaaggtgcttcttctgaaaccaacaagtttactgaagccattcgtcgtccaattgaaccggtcggtacagcatttctacaccatgctacaagaactttaagaaaccatacctggtctgaatttgagaaaattcaagctgaacaaaacgtcaagaaagtcgatgaaagtaacgtcgatccagatgaggcattgtttgacgacgaattagccgacgagaccttgttagaacatgatccaagagattggaagactgctgacttgtatgctgccatgggtttatccaagttgcgttacagggccactgaagaacaaattatcaaagctcatagaagacaagttattaagtaccatccagataaacaatcccaacgtggtcatggtcaacaggatgggttctttaagattattcaaaaggcatttgaatatctaaccgataagaacaagagattgcaatacgattcctgtgattttattgctgatgttcaaccaccaaagaagggcagtcaatacgatttctttgaagcatggaccccagtttttgaatctgaggcgcgtttttcaaagaaacaaccagttcctcaattaggtgatgctaattctagtaagaaggaagtcgaacaattctacactttctggcacagatttgaatcctggagaactttcgaattcttggatgaagacgttccagatgattcctccaacagagatcacaaacgttacattgaaagaaagaacaaatctgccagagacaaaaagaagtctgctgataatgctagattagttaaactagtggagagagccatgagcgaagatccaagaatcaaacaattcaaagaggaagagaagaaggaaaaggaaagaagaaagtgggaaagagaagctggtgctagagccgaggcagaagctaaagctaaagcagaagctgaagccaaggccaaggctgaagccgaagctgctgctgctgctgcggctaaagctgacaaaaagaaagctaaggaagctgctaaagctgccaaaaaaaagaacaagagagccatcagaaactgtgctaaggaacaagaatatttcggtgatgctgaccaatctgctgctatcgacgaacaaattggtttaatcgtcgactcattgaacgatgaacagctagtctttgtggctgaaaagattaaggctaacggtgctgaatctaagactgtgttacaagcaatcaccaaagaattagtcgattctggtgttttaccatcctctgttgtcccatattttgcctaaacaatgttgcgaaagaaataaataaaaaaaaagagaaaacaggtagtaaacaaacactaggatagaaatgatgatagaatagttcaataaatacacatcgataatttatagaatgcttataatatgtactcttatatctccatgtatctatgtatccatgtctataccaagagacggaacagcttcacagagaatattatcgatacgaatattattttcatatccacttagataatttctttttttctttcttgtgtctttttcttttattttttttttttttttgtttcttccatttttttcggtttttccatttttccgctggcctaagggggaaaaaacaaaatagttgattgaacatggaaggatcaagttaaaccaaaaacatacacacgcatacacatatacatgcatatacatatacattaaaggtggaagtagggggaagacaagtgtatttaaaaacagagttacattactaacactatcgttttgtgtacaggactctatagttagagttgaccgaataacagagaccactgaacagtgacattctctttacaaacacttactggtagtactatttatctcaagagaggatttaccttttttaacatttaattccataatgggtggtatcttaaagaatgctttatctcctgaagaacaactcttaaaagaaaagacagtgaatgaatcaactagtgaattccgtcaaaaagtttatgaaaatacgcaattgaatgcaaaattgaccaataataagaacaaggatatcaacaacataaataatgtcttaacctctaaaaatgatataactggtaataaatttataccaaaggatacattgttaatgaagcgtgaagaaatggccaagatatcaaaagaaaataaaaattccagtggcgatgaaaatgcgaatatagacgaaaatgaagacgaaagattacaatggaaccaagaaaatttagaacaaaacgaaattaccaaaaagcaatttcaagatatccatgttgatgaaccaaaaacaccgtatcaaggcgctatggatccaaatggtgagtattatactatagatgatgaagacaatttgaacgatttttctctaggagaacctgagatacagattcctgaaagtactagtttacatgaaggagtaactataaaagaagattctgaacaagaagaagaagaggaagaggaagaggaagaaagtgcagaagctcgtcataaaaggttcgaagaaatgagaaagaaacattacaacgttagacatcttttcaagaaaaaataaattcaagtatttactttcttgtatcccttttcagcctctcgtacctgttcccttttagcaatttcgatacatattatctttctatcatacataataatactttagaaattattatagttattattattattattagacattctattatatatatatacaaataaaattaatcgaaacaaaacaaatattctcttactagttatacatgtatattaatgtcaaggaccatagaatgtatgctacattcacgatcctaatacctacaattaacaatatctttgtatatcctttcctatattttaattaaacacaactatcaaagaaagaatcaaagaaaaaatcaaagaaaaaaacaaaaaaaaaatgagagccgtaaatttttcaaagtttctatgtcgagagcatcgactctaatcattttactcatttgcttactcacttacagatgtgtatcttgttttagtagacattagaactgatcaactaacctgatctatctatctatatagatatttcaccaattcatttcatttcatatcttttttttctttttatgttgtttttttattaaagatttctcacttttgcccttttccctccccaattccatttcacatccctgtataacaattcctaatagtcatgtctcatcgttattcagtttgtattccaacagattgcatttggtcttgtgagaatttggaacagataacgaataaagtgtaccaaattgccaaaactttgactttatttaatgttcaagaatgtgtgatcttagaaactaaaagaccttccaaatctaacaagatccatccgccaaaagacaataaattgagtgattccatgttaatttcatcgttattacaatatttcatcacaccatcctatttaagaaaaattgtatttaaatcaaaattccataactatttccactatgcatctaaattacctaaattgacagtattgccttatatgagacaaaatgacgaaaatatcaaagtattccgtgaaggtgtgtctatcccaatgaaaagaccagtgaatggcaaaaaagtcaataaacaaactaaatatatttgtgttggtaaagaaaaaccgatagaattaaagagtcaactggtaccgaacaatgtaagggttaccgtaaatatcaaagaaaacaaagttgtatctccgtatgatgcatatggtacagagaatgttggtatcaatgcttcctatgggtatggtgtgcgtatcgcccattcatttaatgaaattttcacagagatggttgttccttatgaacaaagttgctgggttgaatgtggtgactattacaaagtaaaagagaacgaacaattgtcaactctagctaatttaagggacggcaatattttgattatttttggtcaatggaatagattacaagattctcttatcaaggatgaagaaattgtcagtgtttctcaatttatggatggccaatgggccttaccaaaagtcattccaactggtcatttaactgtagaggatgcttgcatggtagccctgacaagtctatccatcaacagttaaataactatatatatatatatatattatccatccttattatcattaaattaaggctatatataaatacaatagttcttataattgtatattaactactgttaaaggacatacacccaattcattaaaaaacttgtaccaaacaactaaaccagcttctggtcctaatcttaagactcagatctagtgtcccacaatatttgtactcaaattgaatacgctttttatttatttctactgttctgttgtttaacaattcaagatattagggctagagtaattttttgagatattccattactaatcctaaaaattagcataggtctttttaaaaaaatattataaaaaaaaacatatacaaattctatccgtattaaacgatctccaaagcacaaactcacgtgaccttcaatcaattccgggtaactactatcgttggaaaaattttccaaaagagttttccaaaagctgcccaacacaggcaaaaaaaaaaaataacaaaggaacaagaaagacagggaactaaattttagttggacaacaacgctacaaaaaaaaaacaattagcttattatatatttaacttcaagccacttttttgttctttttgtttctttataggatcggaaactatctctcttgaacctagagatactcaattgccacataatagtgagaccagaacatattccagttatgtcccgattctttgctgcctcaacttataacgacgatgacgatttcggtggtctttcttcatccagtgatgaagaatctttaagatccatctcctctgactcctctatggatttatcctctagcgaagactctgatgattctttctttaatgacagtgacgaatctgagtctagtgatgaaggaggtagaaactatgatgatgatagtgattctaagccttatggtccggattggttcaaaaaatcccaatatagaaaaggtccaccacaaaataaattcttaaagtcggttgaatcatctgatgagtctaatttatcaagtgataatgacggacaatgggattctgatatggataatgacgaaagtggtaagaaagtggtcaagtcagcacgggacaaattattagatgaaatgaaaactatcttaaattatatatccaaggctggtatagatcaatctaattctactcagttgctagataatttcgatctcttattaagattacaaattagatctatccaacaaaactttggtactccgccaatatttattgaaactttaattaaatataacgaatttattaaagatttagattccaaagaagatgacttacaattcgataacaaatctgttgctaaagcttacaacgttttaaaacaaagagtgaaaaaatctattaaagaaaaccaacaattcatcaatgaagatggtactgttgctataagtgctatggaagcaaccatttctcaagtcccattattatctggttctggtgctactaatcttatctccgctcaaacaaccactagtggtaatttccaagacttgttagagaacacatcctccggtaattacttcgaaactttgcaagctgttatcgattctcgcggtaagaagaatgttcaatcctctgacttaatctctgttttaaatggtcttttaaatatcgaaaatatctccgcataccaaaagattatgacatatttgactttgattccaattagattagaatcctctcaacaattgtcttaccaaccaattgaccaatggaacgaaacttttgtcactgtggctaatttcatgtctttattagaagaaaacatttctaaataccatgtttctgaatttgctaaatacaacgacaatttaccagttgaacctgaaccagtaaatggagtggttccaattctaggttctatttttgcttttgtagaaagattagatgatgaatttaacaagtctttattaaacactgatccacactccagtgattatttgttaagattaaaggatgaaactaaattatacacattattgattagagtccaattatacttagaaaaagtctacctagaaaaacatccattggctttgaatagaattatcattaagagattgaaccatatttactacaaatctcaaccaattgcttttaaattagaaaagttagtatggaaaaatatttcttattcttcttcatctattattgcttttagtgaagacaaagattatgttaccaacttaattaatacattaatagaatgcatcgcttctaatattgaggctagcaagaaatccaacgaagtcaataactttgctactgatgtagaagatgatataatccgttctaatctattcaagatttattaccatgcattgaatttaacttacgacttcaccgagattaaacaaatgttaatcaccttaaatgtcaacaaagttagatcccaatcaacatccacttctttacaaatattattcaaccgtgttgttgtccaactgggtctttgtgcattcaaatcttcgttaattgaagaatgtcatgaagtattaaacgagttattatcttcatctcatttaagagaaattttaggtcaacaatctttacaaagaatattgcatcatcaatccactatcggcaataataacactaatattaatttaatcgccactgaacaatgcttaccatatcataaacatatcaatttagatttagttgatattgttttcatgacatgttctttgattattgaagttccacaaatcactgctttctattctggtattaagattaagaagactccatacactgccagatctataagacgtatattagaacatttcgacaagcagaattatcaaccacctgcagaaagttctcgtgatctaatcatttttagtgctaaagctatgcaatctggtgattgggctaaatgttatgaatacttattgaagattaaagtttggaaccaattactaaaccatgaagaaatcttagaaaacttacaaaagagaattaagttggaatctttaaaaacatatttattcacatacaagagattttactccaacatttctattaaacagttaagtgaccgattccagttacctgaagatactattttggaggaaattccaaaggttctaaagaacatggaaatcacttcaattaaattgaatgattcaaatgactttattgtgtttgacaagactgatgaaattactaagttggaagaagttgccattaaattaaacaaagaatataagatcaccaaagaacgtctattcccaccacgccactaaagtgatagtaaccaattttaaacttagatagtataatcattgatatttaaaatattgtttaaactctaaacgtatattccaaagtcaaatttctctataaactattgtatccgaataaaaagcagtatacatatctaagaacgaatacttacatacatatatcattagtgtacataaaatttaactgtagattaattttataaatatttgaataagaagatgcatttgtttcattatatagcttttgatgattgtatcaaacgataatttatcagggagagaagggagtgtaatattatatcactgactaatatatgttaaaactaattaaatcaagtattaaacgcagtaaaaccattcagcaatgtaactcttgggaatggatggtatgctgtcgtttcatttatcgaaacaaaatgtaaaataaaacacttaaagatgacagaattggaaaaacttgcaggtatcccaaacccgctcaaagattccgttaacacaccacatgattatcacgtgcacatgaatttccttttccattttttattttttttttttcatttgcaatgaccagaacagaaatgaaaaaaaaaagaaacatttggaatgaaaataagaaaaccaatagaaacaaaatatagatgagatgatgtaagaataagaaatagtccatatatttttagaccctattggcctttagtgttgttagtaccccacattgtccattacaagatactaataacaatatagacaaactaaaaaactataatgattgaattacctactgaggtcactgaaacgttacttcagatcttacaagggtttgcctcttcggacaatgctatccgttctgccgctgaaagaagtttgaataatgattggattacaccagaaaagattcaagttttattaatatttttggctatccaagcttccttctccccagatattacagttgctgctttatctgctgttttgtttagaaaattagcccttagagcacctccagaatcaactacagttataatcgctaaaaatattactaatatcgacaaacaaactttaacagctatcagagaaacattgctagcagggtttctctctgagagaccacgtgacattagacacaaattagctgatgctatcgcagaatgcgctcaagaaaatatggatgattggcccgaattaattcatgctattatggaatgcttacaaagagatggttctatgtctaattacaaagaatccagtttcagaattttaacgtctgttcctcacttagtcaacacaatagatatcaatacaattttaccaattttcgaaagtggattcacagatccaaatgatgaagttaagatttccgctgttacagcttttgttggttactttaaacaattacctaaggccacttggtccaaatttggtgttttattaccaagtctgttgagtagtctaccaaaatttcttgatgataataaagatgaggctttagcttcagtatttgagtcattgattgaattggttgaattagcaccaagattatttaaagatatgtttgaccaaattatccagttttgtgcaattgtgatcaaaaataaagatcttgagaatatgccaagaactagtgcgttggaattattgactgtttttagtgaaaatgctccacatatgtgcaaatctaatccaaactatgccgatactattgttatgtgtacattattaatgatgaccgaagtgtcatttgatgatgacgaagctcttgaatggaaagaatctgatgacacagatgacgaagatgaagttacatatgatcacgctagacaagcgttagatcgtgtttctctaagattaaacggccaatacttagctccaactctttttacatatttacaacaaatgattgcttcttctgattggagagcaagatttgctgctatgatggctttatcatccgctgccgaaggttgtcaagatgtattaatcggtgaaatccctaagattcttgatatggtagcccctcttatatctgatccacatccaagagttcagtatggttgctgtaatgtattaggtcaaatatctaccgactttgctccattaattcaaagaactgcacatgatagaattgtccctgctttaatatctaagttaactccagactcttgtgaacgtgttcagactcatgcagcagctgctttggtaaatttctcagaacaggcaaatcaagctattttagaaccatacttagatagtcttttatccaatttattgactttactacaaagtaacaagttatatgtccaagaacaagctttaacaacgattgccttcattgctgaagctgctaaaactaaattcattaaatactatgataccttgatgcctcttttgattaacgtcttaaaaactgaaaatcaaggtaataacggtgttttaaagggcaaatgtattgaatgtgctacactaattgcggcagccgttggaaaagagaaattcagtgaacattcggaagaattaataaatcttttattaaatcaacaaaactcagtgatgtcagatgatgatcaaatcaaatcatatttagaacatggctggggtagaatttgtcgtatcttaggtgaagacttcgttccattattaccaatggttttgcctccattattggaaactgctaaagcaacccaagatgttagtttaatcgaagaagaagaagctgtcaattttcaaaagtacgttgaatgggatgtggtccaaatccaaggtaaacatattgctattcacacagctttgttagatgagaaagtatctgcaatggagctaattcaattatatgctagcgttttaaaaaatttgtttgcctcttatgttaaagaaattttaattgaaatagctattccttccattgatttctatttacatgatggagtacgtgctactggtgctgctttaatccctgttcttctatcttcgttagtttctgctgcaggtaccgataatgaggaagttaaacaactttgggatttgtcatctgcaaaattaataagtggtattaacactgaaccaatgctagaaattgtccaaagctatcatactgcacttgtagatggcttgggtattatgagaaatatacctttagctgatgaattgctaagtggctatatcaagggtatatccaacaacttgagcgatgtttatgaaaatataaaagaccgtcacaatgaagctgatgagtacaatgaggaagttgatgatgatgacagttatactaatgaggatttattagatgaagttaacaaatcgtttgctgccatcatgaggacatcacgtgaaaaattcttaccacacgttcaaaatgtcttacccttaataaatacatttctacaagaaaacgaagtaatattgattctattctcattagttgcaattggtgatataatacaaaattatggtgaggtcacttcctcattaaaggacacttttattaccaaagttgtttcttgcttagtttcacaagaaccacaaatccgtcaagctgctagttatgtgttaggtgtttgcagtcagtatgctccacaatcatacgctgatatatgtgttccctccctagacacattaatccaagtgattagtattcctaatgcaaaaaatgaagataatcaaactgccacagaaaatagtagtgctgctatagcaaagatcttatacgcatacagctctaatattcctaatataaattcctttgtatctagttggttaacttcattaccaaccatcatggacgatgaagcagcagcatttaattacagatacttagcccacctaatagataccaattccccagttgtatgtgatccaacaaaagttcaaaatatattggactatgttctcaaagctttgtattacaagtcaattactggtaaaaatgctgaggatgtagttaattctgtcaaaaaactaatggctccattaccccaaaatgatgttgtagccatattccaaagatatccacaagattacatgcctattatccagaagtggttctcttaaacttctgaaatgtgggttaagtactcatgtttaaaatccataaataatatagtcatactgaatcgacaaacacctactaagaagtggtagtctgcataaggatatctataaaacaaatctctttctttgtactatataatatatccctctataaaaaacaacttttaatagaatatttgtatatctcaatcaagagctacacagaaaatcttaaatataaagacatattgaaaataaaataagtataacctagtatttataaaaatttttatattagcaaagcgatttctatttagtggtttgaaatgctgtggaagaaggagtcgatctcaaaatgtgtaatggtgcatccggtccagtatcattattatcttgcttactaggttgaagcatattccatagaggtataccgttcatcatctcttttggatccatagagaactgatcaacaaatataggaatgatcaaaatggttaaaaacaagataaataaaacaaaatagacaacacaatattttctgattgtagcatctctatatttttgttgttttattgtaaaaattctattatcttttttaatattcttgggtcttaaccaaaataatatcatcgaatgccaaaaatcgataaaaggaaagaaaagtattggcgtttgaagatataataagaaatgtaccaaaaagaagtctgcaacaaaatatgacatttccatgactttaataaaatactctcttacaggttgaaataccactgaccatcccatcccagtattataccactttcctgaccaccaagcaaggtttgatttactgtttttaaattcctttgtaaaaaattgaatgaggactctaaacatagatatatgcaaaaatatcgtagtaattactagaattaacgttcttttgaaatgccatccttctaaaaaccacattatgacaaaatccaataaatatataaaaacagatataccatgtgcaaggaaagcaactgttgcacctgtattataatgacaacagatgagaattggtccacaaataaaggatatacaaaataataccaagagactacccatattgactataatagggaaaaaagttactagaaccagacggaatatagagtttgtcggtgttgtatattttacaccagtctgtgcattagcaaatgtatatgcagtgaagctaaaaagaaatactgcaactggtacaaaaagttctgaaaaaaacaaattccatagttgaggccgatgataacttattacattttgctccaatgtattggcgctgtttctattcttacatccaatgtatcttgttctttgttctttggtaaatgatgtccatgaatgttttttaaagtaatggttaccatcggagaaccaatgaagaatatttttataatcaagaataaattccgacaaaagatattgatgtggattaaaaataaatggggcaaaacaaagagaaacaactgtgatccaaaaccataataatgctggttgccacattgtaacagtagcaaaaagaagcatcaaaaatatatgaaaacctgaataaatcgacacagttgcatatcttgaatagagaacagtaaaatcaattcttgttattgcaaacccacgtccactagatatatatctggcgccaccaaaggttaaatcatttaataatgaactagcgtaagtttggcacacaaacacttcaaaaagtggagccatagataggatgtgatgaaggaatctcttcaaggctctcaagatacctttttccagtaattcttgaataatcaaaggtgcaaatgcaataaaaaacacaataaaaattgacaatacaaaaattgaaacccaatgtagtgcagggtcaatattataacatcctattggttcttgaagatctgttatttttgaattcttttttttattacagctgattgtttccaaattcagagatcctaaattaaggagcaaaataaagaagagattaagagacatagatatgaataagttattgagatgaaatccagggtgtgcataaaagaatgttaaaaatctatcaacaggcaattgtgttcctagataataatactctctggaaagaagctgttcacccatacctgcaccaatttttgtggtgaaactaagaattgaatcaaaacctaagtcacgaccttttccacattgatagtaatcactatgcttaatacgacctcctctacacaatgctgtgataccagcatatatatcctcattcaagtgtaaacccttttgtgcttttgatattcctcctcttgtaaccataaatatggcatttaaaaaatcaggatgtccataatgcagcttgccaccaatttcagcaagagtccttgcaaataacgtcccaaatgtttgttcttttcccgcagctacatcccctaatactccaatattctcagaaaaaatatattctcttgccccaataatagcgactggggcctcacactcatcatattcaacaccaggcacataaggaatatcgtttgctatagataattcctcaaattcacttaaaatagaacgaattttaagacattcttctatataattatcttgattagcatctataacttgaatatactcaccacgataaaaaattaacgagtgattttgattgtcagatttaccatttcctaaaatgggattcccagatagtttaattttaaaaattggcatgcgacgtttcgtatctttatcaaaatttgcatggccactcgtcaaacaagaatagtatattacatctccagttttttcaccttcctcttctagaaggtaggatatatacatgcagggaaaagactgtaacaataattcgacagattctttctcctcctcactaaatttagcataccgttgcatagcaacaaccatcctaaactttctatagctcatttgttcaagatcatcttgtaacgcaatttgattattatcgtaaagttctaacattgaagggttttctattctatataataattgaatagcatcattataattcataaaacctgcaacagttctatacaaagtttgagctctaagagaagcccatattcttgttcgaagtgtgtaaagtggttcagaggatgaaaatccaattaaactatatggaatatcatttgcgtgatccataggtttcgcagatcgagtagtaaaacttttttcattactatttttattattttctgctgatgcggtatcttcatttttaaatgattgaactgcccctgaactggtatcagaatcatgattcatcaacaagatattatgaatattttctattttatcctttttttttgccaataatttggtgtcagttataaaatttttccactcttcttcatgtaggtttttaatatactctaaaactggtattctacttttagatgattcatcccttattaactctcttaatcctaacacaattttttcttcataatggggaattaatactgtaaatgatggcatacattcgattggcattggttcagccattggtgttgataaggattgtgcaaaaaaagatactcttctttctgcttgcgaattaggtggaaagtattcttctgacttgtatgtagaatcatcttgagctataaaaaatataggaggttttaagccctttgactctgctaataaagcatcaacttgtatataaatcaatttttgcacatgttcaatagccaatagatgctctctatacattgatacaattatggcgttccatgtttgggatatgagccattttggttttaatctaactcggacttctgtagtaaccaaaatcttagcttctaatctttttggtaaacgtgaatagatgtttttccatggtgtaaagattgaggtacctaatgataatgaaatgacaattgaaaaaatacaattacaaataatataccataaataggtatctaagaagaataaccccaggtcagagagaataatcaagaacaatgtgattttcccttggagtttgcatagataggttcccaaaataagatctccattacatcttgataagtcaaggatcgacaaaactctaataggatcttttattgatagggtgagaaaaaaatatgattcaatatattttgctaaaaaaacaaaaaaccagagtccgcaagaaaaccatctacttcttgtaggtaattggggaaaagatgctgtaaatgtttgggaagatatatatcttctcttttttctgcctttgtttaagtatgagccaaagaaaccacctaagggtctaatagaaaatatcaaagttgttagaacagcaataacaatctgaataatggataaaacatatgcataatatgaataggttacaaaaccataacgagatagaatgaagatagtaggtgttatgtttattattaaacaaaagattaggcaacacattctccaagaaaggggctgagagcctggccataatcttgggacacaccaccattcaaaaaaagttgctaatatttgaattaaacatgcaatagaaccacctaaggcgacaattgtatacctcacttgttccaacggaggattatctaaaagttgaacataatcctttgtatatatagttggtgtgttataggttgtgaaaaaccaaaatggtgcaaaatgaataatccaaaatctattgaaatttgtaatacaatgaatccaacttctactctctaaaaatgttttataaaaaactttcttccaaacaatattctgaaaattcaaatatctttctggcaaggggatatctattaatctttcacctgtatttaacactattctttcaattccctcaggataccagaataattgattaatatcatcatatcctatagttcgcttatggtctttatttctttcaatccactgattatcagcggttggctttttcaattgattccttagaaattcatataatggtgttataacgttatttaaataactgtattctggtaattgtatattttggttattttgctcagtataagcatcaaaatccaaagcacatttatatataaagcaaagacattctgaggtaaacctgatttgatttgcttctccccaacatagcaaataaagagctagttgtctgatcatatcagctggggtaagttctttcatttttaacttccatttataatcagcatttttcaatgggttatttttagtctctttatcccaagtgttaaaatgtggatgtgaattgataaattcctgctccctaatctcccattcttttatttgatctttaatcggaatcccatttttcttagatatcttaatatttcttttataacctttccctctaagattcatatttctgtatcctaattcttcatccaaatccaattgagcagcaaaaaaccattttttgaaatttgcttgatcgcctccgatatacgacgcatgaagagagattaaggcattatatgcatttgctctgcttgctctagaatccaactgggatagtaaatgttgaatcatatttaactttgaactatgttgaaagccaaacttcagagttagttgttcaaatatgtctttaatctcttgttctgtaacaggaacatcgtcattctgacaccaagctgggtatagcattgtgtagttttaagtcttatttgttgaatcttgtaaacaaacactatgtttattttaaaaaaaatctagtaaacatagacatatcatatatatacatatatatatacttcaaaccttttttgaattgaacataaattagccgccgagttccttatgtccatattcttctcactaattattaatgatatcaaaatacaaccctaaattaggtcttctctttaaaaaagaaaaaaaaaaagaaaaaagaaaaatgtaaaaaagattttcaatatggaatccgtcggatttaatggcaaatatctagcctacaaatttgtaagctgtataaagaacaaaataaaaaaaaaatacaaccgttaacaattccttgagataatagggttcaggaaatcaaatcaccaatagacggtaacctctttaaacattttatcacacggaaggtcttgtaaacagaaaaaaaaaacaatagtcttctcaacagtaagataatccctactataaattaatgtgtctttcactttttctctggcaaaaccctaacactatttggtttgaaccaccaaacaattcgaatgcataacaaaattgcataaaataacattgactatacagataaaaaaaataattatgcttgcacccactcattaaatgctcaatgcccttctagacttctagaaaaacatattgaaaagttgcactatttgattgaaaaaaaaagcaataaacgtggtaaaacaaaaagaaaaaataaggtaccaaattgttttatttttctttctcttttttgtttttttttcctgttttagagatggaacgaaagattctcgtatctccgaactaatccggcaactatttagaacaatatcgcggaaaaaaaatcaacaccaccacgaaaaaaaaaacaaagcaaaacaaaagaaatgcacgatctggcacgaatttcattttatactctattcttggcattaaatggtgtctccaaattgtttcagaactgtttaaaacaatgttgtttacaattcaccattttgaaaacctttctgaaatttacagccaaacaatacgtaaaagttagtggaaaatgaacatgctcgaatgttcaaatcttcgaacttgcccacttatacctcacattatataaaatgtatggacgctttatttatatatacatataaatacattaatatacttactctggcgtatcttgttgactcaataaatttatatattcaactcgacatttgttctttaccctttgaactcatcttcctttccagacatcttgtaatcaaatttcagttatcctgctaatccaaacatttaaaagtggttaacgtctattctgattccaactttttgtcactcctttttaactgaaaatacaaaaaagttcctgtcaaatctttctctaaggttgcgtgtaacaaatgcgtttttcaagtgtcttaactagtagtgcccttttaggttcagctattgctgctccagctttacaccatggacatcaaaataagagagatgtcgttgttactactactgtccaacgtcaaattactgttgtggtaaatggtcctgctccaaccaccgataataccgctgctccagctaatgcaaatacaattttgaataacgaaacagctacaatttctacccctgctgttgctgcctccgctgttgcttcctctgctgttgcccctgcagctgctgaaacttcttccactattgaaaaccaaactactactctagttaacagtgaaagtaccattgcatcctcaactacttccgttgatacatctaatactgcagcaactgccggtgctaaaggtattacctattctccatacaatgccgacggatcatgtaagagcacctctgaagttgcctctgatttagctgtgttggctgatttcgatattattagattatacggtgttgattgtaatcaagttgctaatgtgttacaagcaaagactccatctcaaaaacttttcttaggtattttttatgttgatgctattgaagccggtgttcaaaccataaaggctgctattgaccaatacggttcatggaacgacgtttacaccgtctctatcggtaatgaattagtcaacgatggtaaagctacacctgctcaaattagtcaatatgtgtccactggtagatctgctttaaaggcagctggttacactggtccggttgtctctgttgataccttcattgctgttattaacaacccagaattgtgtaactattctgattacatgggagttaatgctcacgcttactttgacaaacacacagtcgctgctaatgctggtccatggcttcttgaacaaattcaaagagtctggactgcctgtgatggtaagaagaatgttatgattactgaatctggttggccaagtaaaggtgatacttatggtgttgctgtcccctctaaggccaatcaaaaagctgcaattgcttctattgagaaaacttgtggaagtgacactattctattcactgctttcaatgactactggaaacctgatggtccatatggtgttgaaaaatactggggtattttctcagattaagatataacgacttcttattttttttatgaaactttacgcacaaagatgtcaactatatacacacacttctttttctttttcttgcctcagttttttaaaatgtaacaatcgtgcaatacttccatttctttcgttcgatttatctttattatattcatttcgataccttactttatattttattactacttatgtaaagatacatacatgtttgaattcgtatatagtatatttatgaatctatatatatatatataatagaacattattagttctaatgagtttttaaaaaaaattaaacatgaaccttactaatttttgataaacattggcctatccccggtggaatgcgaacgtaacctatcaggatgatccataactatactatcccaatctttcattttgtcgtacagaacaatcttctctaattcttcattagtataaccagataatgacttcatagacatacgattaccataagaaattataacacctaatttaatccttgaaaactccttttgtcctagaccaaataattgatgaagtctctccttcgtatcagtaaatttctcccctggtaataaactaaataaaaatgatataccatgtctattctccaaatccttaaaatattgactgacgattacaattttgccttggttagaatcgttcttatctctactgaacgtgacactgttctccatatttacttctggagtggttgaattagtatcactatctgaatcaatatcttgttttgataccaaatgatataattcttccggcaaaaccctaccaaatatcaatgaagttttaggaatttgtttaaacatggtatcttctgataaaaccatctcaaatttaaaattattatttgtccagagtaacgtatcgttcttttctttatcagaaataccgatcttattctgtattttatctagaaattcctttactgtacaattatttggtatttcaaattcaaaacattggaaatgaatataactattttttagccagtaaaatttaacaggtcttaaatgttcaaactcttttagtgggatagataaaacttcgtattcaaacggtggtattgaagaacagttaaaatctttgatcaaaaagtcatttaatatggaatatgattttagagcaaagcgtccattggaatatatagcaaaaatttttaaataattggcatcacatccaactttttcagcaacaaccttggacaattcttcaaatggtgtataagctgaggcccatatttcaaaatttttatcaggtgaattaatatcattatattcttcttgtgtatctgttgacttagtaaatttcaaattaaccctatgtcctagaaaatcgtagtatttaacaatatcatcatagataggttgcctattgtcatgaatattgtcttttgaacacagctcaaatgatataatatcaccagtatctatttcagccgtaataaattgggaattgtctgggagtaatgcaatgttatctacattaatctcttcgtataatttcaactcctctttgtttccaataatttcattcaacatctttttaaaatcagagacttcatcaaatggtgatactaaaacatgaccgaaacctaataatttttgctcttccatattaaattgtttaacaaaaataagattagtagagtcttttaaaagtgggacaggatacacttctaaaaattcatttaaattttctcttatttttctgattagtacatcatccaccttttcaaaatcaattttattatgtttcctcaactccaataaatacttcaaatctaaatatggttcttcaacaaaaacatcacatccttgaacagattgttcttcttccagtcttaatacatcttctattgttacattcacatcacttggatctaaataatgagaggttcttaaagtactattttgacgcataatcatatcccaacatctaatggtattctccttgggaatatttaatttatttttgagttcatcataaaagtctaccaatttttttgttctttcgacctttaatgttaatggttgttctttaccattattaagaccctcatacgagtacttgaatattggattaggaacagtatctaaaccttcaaagttgataaagttcaacaaattatgaaccctaatgttcagatataaatgtgcatctctaagttccttttcacgagcagcacgttctttgttttctctttccactcttgcaataatatgttttggaacatcttcaatagtaacaggtcgtaacaattcttcttctctatcctttctgatatatactaacatatatgcacttgtatgacgggctaacatatattcctgatattgctctctcgacatcattttaatttgttcttcagggagcctttcaataccaaaattttcatctaaagcttgctttttagttactttccatactctttcatcatcaaatctgtaccattgatcttccacatttggcttaatcatggcataataatgtccagttgagatatcaccagcatgaaccaatataccatgtaatctatatatatgtgcatatggttcattaatttgtggactatctttatcaagatatggcaatacatcaatagtctctggaaattcataacgatcgttaatttttattaattggtcataattaaaatcatattcaaatcttttcaattgtaaatgcagtattgatgggaacgattcaaatatcacacccttttcagcatcttgtaaaccatgtccctgtgcagcatattgattttccccattcattagttcaatttcaatgtaatttttaaacgaatcttccagtccttttaaatttttaacatttaattgtagatcccaaaaatcttctactctagatgattcgtaatccacattaatacatctaatataacttttcatttttccaacaaaaagattatttaaacttccttcaacaggtgtgcctttcatcctattctctaatctatccattaatattctatttaattcttgcacatcatgttgtgtgaaggcgtctccactatcccatccgaatgagcgtgttaactctagtgtgtctaacggttcatctgagacttgtaattgatagaatgctctctgtaaagccataggaacactattattgggactatccttatctgttggaatttgataaactaattttctaaagatttttgtgaagaaatatgattgtaacaaagaattcaaataacaagtagcaccttgatttttgaaaccgacgtatccagtttctttcttagaattgtagttgataaaattatgccatagaacaccagtagggtcctttaaaatccgaatatagacagtgatatttaatgaaccgtcatttaataaaggtttcaatcttcccttggatggatatttcaggtgattaacatcaacaacattagaaaacccccaatctgtatctgaagaattaaatctatgaaatgacctattaataacttgtacagtggcatcatcttcaggtcttgacagcactatagcgaattgagcacaacagtaccaatcaggatctacattttcttttggatgaggtgccaagtatatggcaatacctttattatggtttccattcggaaatagtaatagattccatttaaaatttcctatctgaatttgcggagactcatattttaattgttgtaatttaaaccaattatcaatatgccatgagaatatgccttctatttcagtctcttgatcttccaattttggtatgatctcttcaaactttttacctaaatcacaaggctctgagaggatttctccatactgtatagcagccatagcttatgcaattaatatacgacaaataactgtgtttttggtagtaatagaagaaaggccaaaccaaaacagagcaagaatattgaacaaatatatcacaacttgcagttattgaactaaactctcaatcttttgatcaagtcactaaatattgttttacaatttgactattccttgttattatttctgttctttcttcttctttctgcaagaatggttgttacttgcttgctgttgtcaggagtttgtctgacatatttgaattcccctttaaaaattaaataacccttcctaaacgaaaatcaaaattaaaaagaaaaggaaaaagaaaagggaaaaaaacaaagaaccccaattttttcttttttttttttttaattttgaaatctccgtaaaacaaagtttcttggtcatgtgaccttagagcacaccatatatgttaatagtggttcagatttctttttgcaacaacaattactttttacaaggtacaagattgaggtagacaagaaaggattcataaatagtagaaggtgatcatcagattttttacttctggatcctagtctgaacaattttaaccaaaactcaaccaaatagaaggatactttattttttaaagcaagaattatttaagttttgcatttccgaagatgttgggaccaatttgtccaacagctattgcttattctatcgggagacacactatcaaaacaggtttgttacaacatgtactaggtatatcacctctatcaagactacatgtgttaactaaaagatatgtgtctagtgaaattcaagctaaagatcaacaagcaggtgaatcaaacacagctacagacacaggtgtgatccataaaacagaaagagaaactttaatctatttccacaacatatatgcaggagaaatgtccatttggaatcctatgctatggttcaattctttgtttgttgaccaatctagagatgcaattagatcaagaataaagaacctggctagtcctgaaacaaaacctattgatggattggaattgcgttctaccatcccagttaaaagagatggtggtgtatttgccacttttttggtaccttatagatacactttagctgaagttaactcaatgattcagcaaaacaccacaagggaatcctccaagagtatcttttcatacttcacaaaagtctctgcttttccagtgaaaggttctccatggattgaagatttaaaaagactacctaataagactataaaaataaaattccaaggtcctattttaactgaagaggaaatttatttgttgtttagaagatatggaaaaattgtggatatttatcctcccaaaaaaggtgaatctgttgcagtactaaaatatgattcatatagaggttcgatttgtgctaaaaattgtgtctctggtattgaaattaataatacagtgttgcatatacagtatgaagccgttgttaagacccctttcattacaaattttttcgtcaaccacacaagaattgcaatccctgtattcattgcacttctttctattgctgcagttttaatatttgatccaatccgcgaattctttattgaacaaaaaatcactcacaaatattcattatctaaggataacatctggattaaaaaaattattaaatttactgattcaacagttaatcaatttactaagtattggtcaagtgatgaaaggaatcacccaattgtccatctttggggtgaaaggatggaaagggttgaggatttgaaaatgtggttagaggaaaacacaaacacttttgttatcatcagaggtccgcgtggctcaggtaagcgtgaacttgtaatggaacatactttaaatgaaagaaataatattttgtattttgattgtgacaaaattattaagtcaagaactgattcaaagttcttgtggaacgttgctaatgaaataggttatttcccaatatttccatgggtgaattcatttactagtattattgatttaatggttcaaggtttgactggtcaaaagactgggttgtctgaatctaaagaaacacaattcagaaatatacttaccacgtctattatgtccatcaaaagaattgccttaaagtattataagccaataataacagaaggaaatgaaaagatcaacattaaagaagaagattatttgcaacagcatccagaagccaaacctgttattgtaattgatagatttgctggtagttcagatataaatggatttatatataaagaactagcagattgggctgcaatgttagtgcaaatgaatgttgctcacgtcatattcttaactgaaaatgtggcttccgatcaaattttgtcagagtcattcccaaatcaagttttcaaaacattaatattatctgatgcgtcaaaatccaatgctaaaaattatgtattatctcaattacaagataaaactagaaatgggaataattatattactaaagagacttctaatggcgaattaaattctcaaattattgctgagattgatgaagcattggatcctttaggaggtagaatgcttgatttacaagcatttgttaggagagttaaatcaggtgaggatccattgaaagctttagaaaaaatggttgaacaagcttctgaacaaatcactcaaatatttttaagtgataaaattgatggggtcaagagtgcacaggcctgggaattaattgagatgttgagtacgaaacctgtaatttcatatagtgacatcgttttcaaaccactatttaaagctgcgcctgaattaggaattatggaattagaaaaaaaaggtcttattacagtgtcaagagatcgtggtgttttccaagaaattcgtccagctagaccattatttagagctgcattcaattatttggtaaatgatgctcagttatctactgttttaaagacaagatatttattaagggttgttgcatttgaaactaaacgaattcaaaaatgggaggaagagttatttccactcaataatcttatggatcaaaaaccattcaaagctagattggattatctttctgggaagattaaattaagtagcgcagttattgataaatgtgaaagtgagataaaagaattgtcaatgaagaaatgaagatgataaatatatatacaagaagaaaaaaaaggaaaaaaaaatggaatcatttttttttagcatgtagaacttaataatattctaaattaagcaaactatatacattatttttatattatttgaatgttaaattaaataatatttacaaaaaaaagcatataaataacttttacatatgtagaaacttctaaccatatgtgaacttaatgaaattgaatagtattaactaatattttgaagtgagaatatttcttcttatgctttattatatgtttttgatatgttattttttctagtactgttgaatagaatagtttagaatagaaaaaggaagcgttttggatagttattccaccatcaacggtgttttctccaaaatttcttacataaaaacttttacaggatacgtagtcttaaacgaaggcttttttacaagattagttacacctctaccatcttgtaagagacttctaactatttttatgatgaactgtgacaatatttgtcttaacaaaaaaaagtattccaagaagacaagctattaccaaactatgttagtatagttaaactcatctgaataatgtataggaaaaggcgaaagcagaactacatagactaatgcttattccacagttttgaacatctgaatacaccccaatttttttcaaaacttatctctattttttatttttttggtcatactcattatcaaaattaccacattggggaaacagtactaacatcacaatagttggaaaatttggagattttagagacatgaaaaataaataattgacaggtaaaaagtggtcttaatccaacatattaacaagaaatccatctagtcagttaccaagatgaaatacttatttttttttgttaatattcaaagaaaagagaaaaaggagagtgagcaaatttgtttatgtcagatgctaggaaaagtctaattttcaagcatttactaagagctaaggaactactaccaattgcataacattttgatataaatggtgatcaaattagggatccaatatcctcaaatagtatcgaagctatcaataaaatgctttagacagaattctataagattgctacataaaaagcaatatcaaccaaaattaatatctttaaacactattactaagtcaaatgttatacaaaatttgatttataacaaaagaagttatagtttaactcctgcttctcattttaaatgtttatctcagttgagccatgcacatatgtcttcttcagaaaataaaaatgatactattattaagagtgtaaaaaacgagctttcaaaatcctcagcctccaaggtaaaaaaagcaaatgttgttggttctactactgtttccaacacaacaacaaaaaaattaccaacaatatccgaattaaaaatcttaaaagatctttttaaatatatatggcctaaaggaaataataaagttagaattagagttttgattgcattatctttattaataggtgctaagatactgaacgtacaagttccctttttcttcaaacaaacaatcgattcaatgaatatagattggtcacaccctactgttacgttgcctgcagctatcacattaaccatcttatcatatggtgtggcccgttttggagcagttttgtttggtgaattaagaaatgcagtctttgctaaagtcgcacaagacgctattagaacagtatccttagaaacatttaaacatttaatgaaattggatttggggtggcatctgtcaagacagacaggtggtttaacaagagccatggatagaggcactaaaggtatttcctatgtattaaatgccatggtcttccatattatccctattagttttgaaatatctattgtgtgcggtattttaactcatcaatttggtgcatcctttgctggtattacgtttttaactatgctattgtattcaatcttcaccattagaactactgcatggaggacagaatttagaagagcagccaatagagctgataataaaggtgccagtgttgcattagattcactaattaactttgaagcagttaaatattttaataatgaatcatatttggctcagaaatataatgcggcattagaaaactataaagattcacaagtgaaagttgcccaatctttagcatttttgaacgccggccaaaatttgatttttacgtcggctttaactggtatgatgtatatgggttgtacaggtgtcctaggtggtgatttgactgtgggtgatttagtattaattaatcaactagtgtttcaactttctgtcccactaaattttctagggagtgtttatagggaactaaaacaatcgttaatcgatatggaatctttatttaagataagaaaaaatgaagttaagattcagaaccctgttcaaccaaaaatgctaccaaattctaatataaagccatatgaaataaaatttgaaaatgtcacctttggatatgaaccagatcgtaaaatcttacaaaatgccagctttatgattaatggaggtgaaaagacagccattgtaggtccctcaggtagcggtaaatcgacgattttaaagttagtgttcagattttatgatcctgaggaaggtaggatattaattaatggtgaggatattagaaacttcaatttggattcgttgaggaaagttcttggtgtggtgcctcaggatacgcctttatttaatgacacaatctgggaaaatgtgaagtttggtagaattgatgctacagatgatgaaattaatacagttattgataaggcacatttacgacccttaattaataagttagggaagggtacagaaacgattgttggtgaacgcggattaatgataagtggtggggaaaaacaaagattggcaattgccagagttttactaaaagatgcgtcgattatgttctttgatgaagctactagtgcattggacacacataccgaacaaaacttgctacgtaccataaggtccaactttaaggaccgtaccaagaccagtgtatacattgcccatagactaagaactgtagcagatgcagacaagattatagtgctggaggagggacgcgtcaaggaagaaggtacacacactgaattattagcccgcgagaaatccctgtacaaggacctttggaatatacaggaaaatctcgaacttattgaaaatgagatcgaagaggaagcaaaaatgattaaccaacgcccatgattagtaataattcatatagcttatagacgtatatacatatatatgtaaatatatatctttttttgtgtatcatgccttatgtttgtttgtttgttcttaattcgaagtagaaaatatatgaactacgagattctatgtttcaattaaatgttaagtatccatttatcatagagatatcacatattgactctgatcttttgctactattactattattattattttgctgtattccctttgaaagacaaaacaattgatctttctaagaaacaattccaaacagagatttttccaaaagggacgtctgtctgactccccccctccctttttccaccaacttcgaccgaatcatccctcaaattattcacttctttatttatcaaaggcggaaaaataacgactttcttactctccaagaatcctcggtatttatttttgtttttattttattttatttttttatttgttttgaattttttgactcgttaccattttttgttttgttttcctcgagattttcttataaatcattcactttggccactcagagaaaactcaggaaaaagaaacgagaagcaaaggaaaaaagagcgcactaactataaaatgtttaaaagatgttaaggaaggtagttatcaggtttccaaatattatatttcacctaaccctctaaagtattcccaactagtaagaatcattactgtttgcttctttcgtatttcaattacttctttacctatttgtcttccttattcttttttttttccttttttttcagtttaagctagggaaaagattctaataagaatgtcttgctgatctattgactgaagtttctctcaaaaaggagaaagaaataattccaagtttgacaagggatagaagaatattttactgcatttttattttttttgtttttttcaaaactatcgagtacaagtcctgtttacactttaacatagaaaacttttaatttttattttatattcaacctgaagaagaaaaaaaggggtaacgaagtaacaaataattaattaacatgtgtggtgttttaggtatagtattagctgatcaaagccgtatggtggcaccagaattatgtgatggttgtatctttttacaacacagaggtcaggatgctgcaggtattgccacttgtggtaaccgtggtagaatttatcaatgcaaaggcaatggtatggcaagagatgtctttactcaaaacagggttgctggcttagctggatccatgggtattgctcacctacgttatccaacagcagggtcatctgctaactctgaagcccaaccattctatgtcaatagtccctatgggatcaatttagctcacaatggtaatttggttaacactgcatctctaagtaggtatatggacgaagatgtccatagacatatcaatactgatagtgactctgagttgctgttaaacatctttgcggctgagttggaaaagcataataaatatagagtcaataacgaagatgttttccttgctcttgaaggtgtgtacagattatgtcgtggtggttatgctgttgttggtatgttagctggttttgccatgtttggtttcagagatccaaatggtatcagaccgttgctgtttggtgaacgtgtcaacaaggatgggtctaaggattatatgttggcttcggagagtgttgtgttaaaggctcataatttcaataagttccgcgacttgttaccaggtgaagctgttattgtaccaaaggatttgtctaagggagaaccagaatttagacaagtggttcctatgaacagttatagaccagatttgtttgaatacgtttattttgcgagacccgacagtgtcttggacggaatctcagtttatcacacaagattagagatgggtgttaagctggctgaaaacattagaagtaaagtgtcaccagatgatattgatgtggttatggccgtgccagacacagctagaacatgtgctatgcaatgtgccaccacactagggaaaccataccgtgaaggttttgttaaaaacagatacgttggtagaactttcattatgccaaatcaggaacaacgtgtttcttcagtgagaaggaaattaaatgcgatggaatctgaatttaaggggaagaatgtattgattgttgatgactctattgtcagaggtaccacatctgttgagattgttaatatggccaaggaatctggtgccaaaaaagtatattttgcatcagcagctccagctattcgctataatcatatctacggtattgatttgaccgataacaagaatttgattgcatttgatagaacagaagatgaaatagctgagctgttaggttgtgaaaaggttatataccagacgttagaagatttgatcgcatgttgtaagactgataagattgacaaatttgaggttggtgtgtttacaggtaattatgttacaggtgttgaagatggatatttaaatgaattggcaagagttcgtgcagagaatgcaaaggctacctgtgatttgaaatcggaggtagatattgggttatataactcggcagattattaaaaagctcttataaaaagctttcatggcaaacagaggaagagggagaaagaaggagaagccaagggataagtagtagctttatatgcatgctattgtcatttttcttctttgtatttctctttcctataccgatttactgaattacaatatttgtgcaatataaaatatatatcatgtcatttcaaataatatatatatatatatatatatgtgtgtgtgtgtgtgtgtgtgtgtttatatttgtataaattggtaagtaaaaatttaaagattttagataaaagaattaaaaaaaaaaacaaaggataaagagtaaaaaaaggaaatagcgaaatataagttaacaagtacatacaaatgtgtccatatatatatatatacatgtgcatgtatgtgtaaatgataatataaaataaatggacgaactattaagtaagataacaaataaatcagcagttcaaatagaaaaagaagaaaagaggaaggaaaaaggggaagaaagagcaagtaatagttcaaggacattaataataatacatagaaataatgaaacattaaaatcatttcaaagacaatttttatcatttaattcatcaagtataggtgatagtaccagtaataccagtaccagtactagtcttttatctttcagtaatataaaattagacgatgtatcgatagatacgtattgttgtccatttgatgatgaggaaggtataaatcttattaaaatggctaaaatatttttaaagtctgttaaagaagaaaacgtccattggataatattattggattggtcaatatatgatcagcaaagatggctacgtcatattttaaaatgtgttggggagatagatagcgagggtaaagaagatcaaaaacatgtagtaaacaagtctattatatgtataaatagtgaacatatatataagatacagaagaatctccctttgtggtattcgcatcacatagattatattcaacagacgttgagatggtacagtctacgaaagcattgcaatttgatgtacagcgaggcaggacagaagaaactttcagatgagctgatcaagaaaatagttaatattaatagcaataacaaatttggtatagaggatgttgagatggctaagacaacaaggattcttataccctatggatatgataatataaagttgattaagacattagacgaaacgtttgatgcggaagaatgtactatagaacgatatgaggaggttataccgacacctattgataaaagtagacaaactggatccatattaatagattcaattgaaccaagcgttgagtattttgatgtgactgaaagattggatattaatgaaataacaagacataaaccagaattcattgatgagcaaatacaatataggcggctgttggaatatagtaagaagttgaacagaaaataaatatacatacaaccataacatacatagacatgacagatagaaaaatagccaaactgcacaaagcatatacacatccaaacacagttatgagatatcacagttcgataaaataaatattacacaatttctggttttttttttttttttttgttttttgttttccttctttgcctatctcttgtcacgatggctcaaagggcgatgagatcataattgagaatatctagacaaacaaatacaaatataaacatatacatatacatacatatatatatatatacgtgtacgtgcctttgtaatgaatgtttatatgattataacagcgtgtttaatacagcaaagtttattaaaaaaaaaaaagattaagaaggctgctaattatatctttttattttttgttttttttttttttttccttttggttgagtatattaaatccatggagtaggtagccatttttatcaactgagcaaatcccttaacaagaaagatatacagttgttcaaagagataggaaatattacaaatggtctattcatgttccaatactagcaccaatactactagtaataccaatatcactaatactggtaccaacgttagcattagtactggtaagaataacacagccagagatgaagccacacataaattatatcacaatggtttgcctattgcattagtcactgttgtcgagaaagagaaattccacggtagagaggtgaaccgtaatgtgaactcgatctgcagggttgtcgagatactggactcctgtcccagagatgttcccctggtggtcgaatatcccaagaacaaataccgttatgtacacgaattgctgccaggtttgttggtcgtctggcaaaggaaagacgtcagggagatttagtgtgtaggtcacgtggacgagcgtcacgtgcttacctgtttgttgtagtacggtgtttttttttctttttttaacacgcgttgtatatacttttttttcttttcaatatttctgattcgtatagaatgctgttctaaattatcataaatcatttttctgtttctttttttttttttctgtttgctatcccccccccttcaattcatttttgattatctcactactttattacgtatatggtgaagtattgaaaacaaactaagacatttttttctttctttctttttttttttttttttttttaaagaatccaaaaatatatagatatcatctatcatagtaggacttgaaaataaagaaggatgaagaagtaattggttcgtattatctataggtacttgtcctgagtgattaccagtgttgaaataattagtatcctgtaatcattctagtagttattgtccttaggttaactcctggtctgttttttttaacctctttgtttctgtttgtatctgtttgtttctccttctatttcactgtacatctttggttaatataaacagacaaacatatctctactattgaataatggtcaatattataacgcctcccataacgaaaaaaaataaaaaatcaactaatactagcaattcaggttctgcggtcagtactagagatttaacaaatgaggatgatgcatatgatgccatttttagtggtgattttggctctttaaatattggctcctttattggtaatgctgacccagatgacggaagctatgacgctactgaacatttacctgacgctatagattttgaagatgaagatgaattagcagatgatgaagatgacatacagaataacaataacaacaacaacaataataatagcattatttttatgaataataatgaaaatgatcaaatttctgtttctcagcatatatttggtgtttctaatgaattaatattggaccatcatcaatctaatactatggatgatattggttttcctggtactaatactttcgatcatttagatattaacaatcctaatatgaacatgaatatcggtataagcactgatgatatcagtaatactaatactaataataataataataacgataataatagcaatattaatcctaatcttaatcttaatcatgataacgataataataataataatgctttgtttatgattgataataatataagtactaatgataacgaaaatgataatagtcatactaatgaggatattaatgttaataataatagaaatagtaataataaccttgatctaaatggttcggaatcgttatctgttactcatataaataatatggatttggatttaacaaatggttatcccaagattatatcctttaacaatgacaataacagtaacaacaatgacaatagtaaaataaaccaaaataaacttaatgatgcgcactcatataatttatttgatttgatgatacagcataataataacaataataacataaatatccaagattctaagatacgaaatccatcaaatgacgaggatatgaaaaaatttaaagaacgtagagatagtctcttattacagtattacttccccacttataaaaagggtaaagtactgaaatggaatagttgtatctatcgtagaaggaacaattatcaatatcaatcaaaattattggtgtcattactgtgtccaaatggtaacatggatgaagttaaatccttctgcccaactaatttgaaatttaaagttcagcaagatcaaaaaagattatttaataatatggactattctactttattcaatgaatccaaaagaaaactaaaaaattatgggatcaagtgcgttccagtttcgcaaagattctcagacccacttgtagagactgaaatgaattcaaaggatggggaggcaggaacaaaaaataacgagatagttgataatcagttgaacacatccgatgaccttttaattgccattcaaaaatgggacgaaaataaaattattcattttgatagtgataataatagtaataaggagaatagtgttaacaccaataaattagtgtctccatttgattataatgaagattggaacgaagatgacttaattgacgccaaactatcaatggcaaaattcgcagaactaaatatgaatgatagcaaattattgttggtccttaataaagaaaatgatttaaagaaaagggaacaagaatccaaattatctaacctagcaacaaaagaatctttgcttttacaaagattcaatatctccaacgatcacacttattccatcctgaaacatactcataagccaaaagtccgtgctacaatatctaatctaaacatagaacattcacaacctgcaattaacctacaatcacccttctataaagttaatttgccaagaacacaattaagattttttcatagacctaagttcagtccacatgtacgtattggttccactatcacctttagtaaattgaaaacaagaaaaagaaagaaggataaaggtaaaagcgttcgtgaatcatttgccacaactcaagatcttactgttggtgattcggctgcaatatatttaatggaatattctgagcagacgcccctggcactatctaaatatggtatggcaaataaactgatcaactattatagaaagacgtcagaagatgacaccttgcgtcctaaattatctgttggggagacacatgttcttggtgtacaagataaatctccgttttggaattttggatttgttgaacctggtcatattgtgccaactttatataataatatgattcgtgcacctgtttttaaacatgaagtatctgatacagattttttgatggtcagaagtgtcggacatggtattaatagattttatttaagaaatattaaccatctttttactgtaggtcaaacttttccagtggtagaaattccaggaccaaactccagaagagttacttctttaaaatcaatcagattaagaatgatcgtttatagaattctaaataaggttcctgaaagagcaatatcaattgaacccatcgctaaacattttccagatcaagattatggtcaaaataggcaaaagattaaagaatttatgaaatatcaaagagaagggccagataaagggttatggaaattgaaagaaggagaacccttcctagataaagacaatacaaaaaaattattgagccctgaacagattgctgaagtagaagcaatgagtcaaggtttacaattcatggaagataatgagaattttaattttgatgataaattggttaaattagaagaaaaattgttaccttggaatatatctagaaattttgttaacgctacacagatgagagcgatggttcaaattcatggtgttggtgaccctactggctgtggtgaaggtttttcatttttaaagacttctatgaaaggtggttttattaaatctaataatgaatctagtaataacgatttgataaagggcaaaaatggtgctcatacttacaatattgttcaacagcaaaaggcatatgacgatgaaatcattcgtacatggtatacacacgctaaaagtttaagtattgtcaatccatttgaagaactggatgacccagattcagttaatcccaccaacagacacgtgttgactcatcgtgatgataataagatacttagaattgtcagaaaaagacgtgatgagaatggtattattcaaagagataccataataattagagatccccgtgttattaagggctatttaaagggtaaagaactaagaaagaaatcagttgatgttgctactctattgaatatggatgaatctaagattgataaccttgatgaaatagaattccaaaagaaagtgctacaaaatgaattagcatctttagaaaaatcacaacaaagaagagctgctaggggaaataagaaacgttttaatgttactgcagttaataatgctacttctaatactactaatactaatagtactggtagtaataatacaactaataatgtcaactctcttgccggtagtagtgaaggtaaaggtcatggtaagaacacaacaaggcgctgtgctacttgtggacagattggacatattagaacaaacaaatcatgtccaatgtataatggtggaataactagtaatagcagcactccagcgccaaatgtaagtgaccagtagtcttaatttaattgtaattcaatttcagcataatttaaatcaactttgcaaatattggacatacataagcataaatatatatatagtatacatcctgttaattaaagatactactacgtatatatatatatatatatatgaattgtaacatttttttttacatatgataaatggtggaatctttacatacttcttttaccaattctttgtcataatcataaccaacaaaggcgtaataaccgggttggcctttatcttcagttaaaggataatgaatagatggcacattttcattttctacaatacagaatgagaaattttcatcatttggttcatagtcacgggtaattcttttcattattattttcaattcacctctcttatcacaacttggaccacccttagcgaaaattttgtttacagatgattcagatccatcgatatagttgatttgttcctttacagcagtacaatggaaccactcatagtgaattctagttgaatatttgaaatactctactgcagcaataagtaataatgatatacaaatgtactggaaaagggctttaaatctaggtttacgtttttcatgaactttttctatcttttcagtaatatctgtggacatctttcttcagtgatactttctaacacagagtaaatagtggcaaaaataatgggtcttctaccttaaatggatatatatatatattaaagaaatgaaatgactctctaacgatgaagcaataattgttgaaggactaatggaaagggtgttattatatttttatttttttgcatttacattttttcaattacttgttatgtcagatatctataaaaataaaaaagaaaaaaggaaattatatacgagaaaggagtaaaagttacgaagtagaaataagctaacaaatagaaggattgatagttggataacgacgagctaatagacattagacagcattagtataaaatttcttctagcatataatatatataaatatgtatatgcgtgtgtttgtatgcgtgtgtgtgtacaaagggataaaataattagtaatcataaaacacataacgcgaataaaagttaaaaaaaaaataaggataaaagtaaaattaatcaattcagaattgctgtccatgaacccattcatttaacattgccaaagaagcttctggttgatcataagggaccatatgaccaccatcgaataatcttaggaaagttagttcattgtaagatttaatttcacctgcttgataggtaccttcttgactgttaacaatccatggttgtaatggcgttgtggcatattcttcgtgatgcttccatggcaagtcatcagcccaagcttggttacccatccagttacaaataaaatctttgtcaccggcatagatcaatattggcaattgatattcatccaatagttccattacatgtttttggtatggcttcatccaatcaccagcaaacaagaaatttttgtttatatcgaagttacaagattcgaaattggaaacttctgcgccaatagcatcttgaacttctttcaaattcaaatattgatcaataggctccatttcggagtaacataatggaccattgcagtcttttctaacgtcataaacatttttaccagtacgttggaaaggacccaattgagcattgttacaatagatggatgcaggaacacatgtccaaacagaatcgtagttatagcatgattcaattaaggaaagacatcttggtaatgaatcttccattgcttggcattcttgtggagataaaattggatcatagccagaactttcgccacaagccataggtttgtagtacttgtattgagttaacggatcagttaatccatttccgattaaaatagaagataagttaaaatttctatttttgtgagataaaatttcggtagcaaaagcaggaatataatggcctgcataagattcaccagcaatatggaagtcatgtgtttttgtagaatattgtggaaattgttggaaaaacaactgtaaaaaggcatagacatccttcccagcagcaatggagtttgtaatagagccactatttatatcatctgaatatgaaaatccaacattgacaggttggtctaagaagataacacttgcattattattccaagaatatgggttgtaaataggtttcaattcaacatctatagcggatggacctagttcaaaaaataaaccagtcatagatgaacaacctggtccaccatttaaccaaagaataactggatcattttctgggtcatttctactttcaaagaaccaaaagaaaaagtgtttcccctcatctttaacatccaaataaccagtgtattgttgaactgtatcaatacctagtttggaaggatctttaattttgttgacacgtagttgaaagttattcaactcttgacttgatacgatatggtcccaccctttcttaggagatacaatttttccattaaaatcagctgaagatgaggaggaaaaaggaaaggattgtaccataaaatcatctatttgaccttgtgggaataaccattctgattttgaacaggaatgagaggagtatgtcgagggttttaaattgttggataatttgatgtccttatcgtttgacgaggaggaaaaaaaggggatttgtagggatatagcatttgcagtcgttaaagtcgtcactaaagtagcaggaaatatagttgaccacttcattgtaacaatatatatagtatactttacactgtattggcttgttggtatgcttagtgtaagaagaatgtgtgtggtctaaatgcaaataataaaaagtgtttatcaaagtgggttcgaggtatttttcttatctgcaacggttttttttatactataaaaaaaaaggagaagaaagcgattgtaatcatttgaattgagaggggagaatgaaataagtagaaatggtcagtaagaatacagcataacttgtacagagaagtggtcactgttgtccaatataggaagcaatgacggtgaaaagtagggagatggatattcacaaatatagatataaagagaggttaatagtattagacttcgtacgaaaaatgtatatataatctgtatgcatatatagctaaaaaaaagacagtaagtactattgatatttatcggtttaagatcatgtattttcgataattgtaataaccaatggttatgttttttaaaatattttgtattctttctttttatgcatatattttttaccaaagatatgttaacctgattcttaaattatattaatatgtttatgacgttggatggtaagtatatactatagcaaaaattattttagtagttctattactttagtttatttatttatttcctttttttttgttttaacagaagaagattttgatgtttaagtgttttataagaagctacctactttatttatcgagtattatttatgatactgttaagtagtaaaagatctctcaatgaaggtaaatatataattactagatttggatagtatttagactagaatagattttatataaatataaatgaacaaatattatcctttttaagcatagagaggagaaatgtagaatcctctttcaacgataaatatattaaaaccgtaatgagatgtccgaattattcaaggtacagaacacaattctgatacaaaaaaaatcaggaatgttggttattctatccaaaatagacatattataaatgttttgaaaaatcttcaattttttaaatagttgtaagtgtagaaatagttacaattagattacgtgaagacaccttgattggatatcctaaaatatgtagtctacaggtaatagttgatctcaagaaaatggtatgtgacagcagaaactttaggctttgcatgtgagtatattcaaacaaatggtggcttaatgttagtggtaaaatagtaaaaaactggtttaaaagatgtctgatcattgagagtttgtaccagcgattgttatcaaactttacatttttattatatctgttaggtttttacctgacggatcaattaatgttaataatgataagaaaaataaaattttataattagtttattggtttgaattaaccaattatataatttgtaagtgtctatgtataattaatatccatagtttggtgctacttgtaataacccttacattagtaattgatctttttttttattttttcaacagaattttttatttttcaccaaaaatattaatttttgggatatttatttgcaaaccaattttaacttgagataaaaataataactactgaaccactttttaataagccttttaaatagtaagagatcattaaccaacaacaaccatcaaataccaaattatctagtatttaataccatttaaagatatgtttattgaaaaatgaaaaaagggaaattactagtccccaaacttacaaaaacctatgctatattttttagtgtcattatcattaaggaaattattaataatctaaaaccattctttttaaattgaaaaaaaacttcctaaatactgatgtttaatgttttgactattagtttaggaaaatgttgataatcttctgttgacgcaaggcttcggaatcaaacattctagtagagttcatttaagactaatataataagataaggtaatttacaataggatattggtggtattataagttattccttggtcctttcctttctatataagcaatatacaagatacaatattatacagtatactcattttatctttgaatcttctttactataaattttcataacttttaatcacttagtacgatgaatttagattatcaaacataactctaataattatattttaacatcttcatttttctaaactttcctttttgcaaattttacaaacatcgataaagacaagagtaaccaacataagtataacagggcaaccaagaagaacaaggaaccaaggattacataagtctagatatatagtatataagtgtatactattaggctatcttagattaaatatatagatatataggaatactacatctagagatataggaagagtctatatcttatatctattcaagtgaaatattattaagatttcgtcatgatcaactgttatcagaaacacataacctaagggttattgcacaacatattacaatattacgaaaaaaacaaaaaactccgcgacggggaattgaaccccgatctgacacgcgacaagcgtccattctgaccattaaactatcacggacctcaatttccaaaggtagaatttacctattgttttagtaagtcccacgtgtattactaatcaccatgattagagaattgggatgcagttctaatccagtagtgcacctaaattaatataataaattttagggttgaatcagtcaagtcattaatgtagtaacctgaataatcgatcgagctccagaaaacatataaaaggacaacgttttctggagataaaagatcatcttccataaccgtttcttgtaaataatttatatattatatatgaaaaaagcaagtaacaagtcaagtaacaagtcaagtaacttcgaataagtacattagctcgatataagtcgcttaatatataagaccgtttagtaattatactatcgactatagttgattactgtctcgattatttgaattactattaatattatttgcgcttccctggaatacacaaagaacttcaccacaccatactacaacagaggcgttgcagaatagaatacttattaccatcaagattacataagatcctgaatgaatctagaattatttattgttttaataagccatacacgtgctacaacattagatgctgcataataaagagattagattacataagattttaacaaatctagaatttacctattgtttctattggaaaatgagagtttattactgtcatttccataagaattatttttaattagtttttctgtatattatgcggtgtacggatgtaccataatatcaagaagacattttatttttcaccaaatatgtttttcgaagatttgaaaagaaatgaaaaactttaaaagaaaacttaaagtaaataaaagaatgtatactaaatacactatataataaatatgtacatgtatttagtataaagtagaacaagcatctataacttaatgatgtctaccattaccatagacgctgaaggctccaaattccaacaggttttatcaagtatttccccttaatatttttccagtgaataaacgattacgcaattataaataaaatataaaaacacaatatatatatatattcttcactcagattgaaaatttaataagtagagttatccatctatatattctttacttttggaagaatttttcatgattttttttcctatcgacattcttttcatcaattaaatcttcgtcccacgtattcattttctttagctgttcagtttccttttcatatgccaatttatataaatattttgagtcattattagcgttttttattatagcatcccgatagtttattgagtgggaggcattgttcaattcatttgatctctgattagcacgaatattacttattttgtattcttttgagaatttcgttaaatattcttcagctttttttgctagtcttgaagcatctgtatttttcttactagatggtttcgtaattttagcatcggtatttttaccacccaacacagtgtctttttgtagattagcaaaagaagtggaatcaggagatagattagaggaattagatgaatttgtaccacccaaccgggtgtgctctattggcttggattgaatgggcgaagtagatgatatagcttcattttcattattactttcattttctgatgtatagtcatcagattcataattggagttcgtatgtacgatggaatcaaataggttgtcaacttcttcatgagtgtcattgttttcagaagaatgttgaactgatggtagtgcggcagtatggatggtgattggttctcagtaggaatgtcaactttgtctgggaatgttgttgtggattcagtaaaagaatctataggtgagttaatgtctggttcagattctggttcaatgttctcgggatagttgtggatggcaattagagtgtcgaagactgtggattttggtgtggagccttttgatggtgaacttttaacagttgaataattggatgtgtcaaccacttttttggtgatggtgttatatattaagtatccatgggatactagggaagggcataatgccaacccatcgtcaccacgaggagaaagcgtggatgttgttgatcctttgtgaataataacttcttgtccaaaaggaagaatagtacccacatccagacctgcaagaccggcttttgctcttgatgaagttttaatagatgagttaaaaaatgcattacgcatgagtgtggcgaattgaacagcataaaaccaagtcgaatttggtaggtttgtagcttgtaaaagtgttcgacaatcgtttaaaaaagttagattaaatcgttctgcaacaccatttgctcgtgaatcaccagcagtagtataaattgggttaatccctttatcttcgaagagtttggttatctgatcgtttgtaaattctgaaccacgatccatttgaaaagataggatgttggtcttgaactgattagacaccatattaatgaactttgaaaatatgcgagtaacattttgtgaatcctttgaatataatggaaaagcccagcgaaaacgagtagattcatcggtaaagctgatgaaataggaaggtgttccgactggtagatgtgacatgggaccgaaaatatcggtatggatatattcaaagggagcatattctttttgatattttatacgagaacctataatatgcttgtgacgagttgattttcctttcatgcaggatgtacatcgaaaggagtgaatgccagaccaatcgacatcagctgatgtgataccagaaatcatctttcgatcaattgtggttttaatatcatgaacattaatatgtccaaataaattgtgtagaaaaggtacagttaatttgatacctaatttgtttatgctgtatgaagtagattgttgattagatggttgtaaaattgatcgaggtatacacatgtacttacccacattaatgatgggagacagaatgtgttccgacttgtctagtaattggcgatgacgagtgtcaactacaataccggctttttccaattggtatgtactaatgaaattgttcgatatgtcaggagcatgaatagcccttataacgtaaggtttggaatgggtttgaaattttagtgatattataccactagcagcagaaggaattgatttgtcatttgcagcatataggacaacgttagcatcagtaatatgatttagaaagtctttgtcattaataacagaaatttctgcaccagtgtcaaggactagatagtctctaagattttctggggagtcattctatgtgtgttctttaatgggatgttcgcattggatgtttgaaattttctttttattttttggttttttagattggtgggttggtttgatagaagataatatattggtgtgatatttgattggataagagcgtggttagcggctatggatatttataatatcatttaaaatatcattcaatgtaatgttgtgaaagttacaattgtgattatcaacgattatttcataaggtccgtgtaataattgtatgatggtatcacataaaattctgtcaagaatagcgatattgtagtcttttgcttgttgtatcatattatttattctttttttaaacaacatagaatcatactttgggtcataacggatatattgtaattgttgatatagtttagtaggagtattctgtttgtcgtattttaaaattgcacattggattaaatcaaagaggaaaaaaataattaataccgtattcatatttactacaataagagatggaacatgtaaacatgggtttgtaacaaggggaaatcaacaaaagaagagtatatataatgaggctgcaacttctattgcaattcaccactatatactaataatagttctttcagctgcttcaatcaatagtaagtacattgcccaattggatatttcctcagcatatttctatgttgatttagaagaaggactatatgtaagagccccatcacatatgaatatgaagaaaaaggtcatgagattaaaaaagtccttatatggattgaaacaatctgaagctaaccggtccaagaaaatatcgaattgtttgtcatcttactacagattaaaggaaatttctaactgatcatgtgtgcttatgaatgataaaattacagtttgcttatttactgatgatatgatagttacatatagaaaaacatctgattccgaaaaatttattacacaattacaagaaaaaattgatacaagagtcataaatctaggacaaccaacggaaggaagcacagaatatgacatatacggtttagaagttacttatatatttgataaagaactatattttggtatggaaaaatcgctaaaagaaaaacttctattattggatataccactaaacaaatacgaaaaattattaaaagctccaagacccctaggaaaatatatcgaaaaagactatgtaagtatatctggattagagtacaagaaacaagtaaaatggcttcaattaatagttggcttagcctcatatgttactcacaaatatcgttatgaattacgtaaatgcaattgcatcgaacacattattctcaagaaaagaaatcaaggaattagctagacttttagtgcaatatctatggggtactaaagagaagaaacttatatggtacaagaaaaggaagaacgaaaatcaaactatgctaagcgctattgctgatgcatcatttgctaagcaaaaggaattcaagtctcaactaggttactacattaaaattgatgacaatataatcgctggtaaatgaacaatatcaaaaacaactttaacatcaattgccgaagcaaaaattggtgctattgatttgtctaatcctgtgttgaaacatatccacttattacttaaagaattatctgctgataaaatatttactaccattgaaacagacagccaaccagctatggcaataatcaaatccaaaggagataaatcgtttaaaaataaattctttgggataaaagctttaaggataagagataaaataagtgaaaataatctaagtgttgcaagaataggtactgaaaacaatattgctgacgttttaacaaaaccagggacatgctagagatacaacaaattaacctcagaatgaattatatgagtatttcaaaatttgggtggtatgcagaaatgatttcctacttgtttagaaggtgattcattccctcaaagaaaagaaaagaaatgcttgtaatgcacaatccaattatgtagaaatatatccacacaatttcaaaattgaagaaaattatgaaacacttttccaaaaataaagaatatataaatggataactttacttattaaatttccaattaggacagaaaatacatatacattatgtttcatttataattatataattgggaaaatatcctatagagtcattttataataaaataaaatattgctcataaagtataatcattaatgctgaagaaacatatactaattttcttcttccagaggatacaatatattatgtcatattaaatgctataagttaatgattttcttgattagcctccctagtgattaccccattattcttacaaaattctttttcattaatcaagatatgtacttatgtattttagtattgctttatttagtggactcaatattttattcatttaggtgtttaacatgtcttttttttttttttttgacaaaccctaaactccaaaaattcaaacaggaacaatttattaatatacatcacaaaactctagataccaataacaaagtgccagaaatctttatcttcatccttaaaatgataattagtttgtaaggaacctaactggaaatccagtagatacacaattccgagggtaacacctgtataggtattgaatctgactggaggatttccagggagcgataattatatcagatcttgtcaagaggcctttgattattgagagataggctaggggtaatcattttatttaaatacatcttagtaattatattaagaagtaactcttaatatcatggaagaggaagactaacaacaagaagaagtaatactacaacatcagggttattaaatagtaatatatagagcttacgtaagggtgtttatacttatactaattgatatgattcatccatttacatacaacaactcttacatagtttaaactatcttgtagtaaaatattatttctttttttgatcaccctattgttatattttgattctttgaatcaaaaaaataagtgtgaatattgtaaaatatataagtccaaatgcaaatccatgaaaataaaaatttttccttgtcaaaatttaccatcattacaaccatatttttttattttataagataggttagtctcagaaaatattaataatatgtatcaactggttatacaccttaaaaactcataaataacttaccctctcagtatataagatatataaaggaatgtatgatgaagttatggtaaataataaatagcattaggaacagagtaatttcctctggaataggattctccaaaacaattctataacatagtcactaacaatatcgaagaataaccttacagcataaaattgtctactgattaattatatgtaatttatcatggctgttttgcttacattttttaaggtttctaaataaatcttcctaacgaaatacaatccattaccaagatatatacacctttaatattattaagcatgcaatctcaaggaaacctgaatataagcttacaattaaatatacatagtaattattttgtatagattaatttaaagtttcacatacaatatgatttattattacacaaagtaaaaaaaaaagaagatattgcactgtaacaaaatagtattatagatacgtaaaataaaaaaaagtaaaacatttaacatattttcaaataatcgtgataccttcagttcttctccccccttaagaaactagaaagaaataaaattatttgcaagccaacatttgaatggatctgctttttatattctatctgttctttttagatatacaacaaatgccttatttacttgggatctacaaaaaataagaactgcagagattttatcaccaccctattgaagttctgtatatttccatgttttttctattacattcatattctagtaacgtttccgtctaaaggcttttacggattattttcaaatccggaggtgtttctgacggcaaaaaaaatacaaaaaaaatccggatctttattataaatcttgccggttgtttcttttaagcgtgtgctcgagctttttgatcactgaaaaatttttattctgcaaaacattttaaacacttaatattatacacagttaaaagatataacagttgttcttcttttagcattttgaaaagacaccgtgaaatacactacacttttcacttccattatataaagaacacatatctaccgtttagcaacaaaaatatatatatttttttttgctaattaccatagtttgttgtttatggattgtaagcttggatataaaaaaagaaccaaagtttagacaaaatcatagcgatgtcctctcaaatttttttaaagacttcacaagacattgaattatttcaaggttacccaaaattcgatcaaattaataccactgcacaacaagaaattgtatctttaaatgagggcaaaaaacaaaccaatgttattgcatctacattgtcgccatgtggtagatttttggcctattcaacaaagaattctttaaaggtattccacagtgaatctctagagaccttattattttcaatagatctaaaagatgtatacgatttacaattctcaccagcaggcaacttccttaatacttggcaaagaccagctgtcgatgatccgaatgataaaaatgttaaaatatggtatttaaacaaagaatttagtgaaaatgctgatattaatccagtttatgaatatcaatacaagtctcaaaattcttgggctttgcaattctcgaagttggatacatatgccattaagttatttttaaaagagattagaattattaagttagaaagagacaatgtcaagttcaattttgaccaaccatacgcaactttaccacagccacctgaaggtcaaccgttttcaacttatttaatttctcctgctgaattcccaaccattgctacttttattcctgaaaagtcgggtaaaccagctcaattaaccatctggcctatcaatgaaggtaaaattgtaaaaaaaatcgccacaaaatcattttttaaagcagattcatgtcaactaaaatggaatccacaaggtaatgctgtgttatgtttagcaattaccgattttgatgctcaaaataaatcttattatggtgaaaacactttgtacttattgtccttccaaggtgtaaacggtactttaggcagtaattctgtccgtgtgtctttgactaatggaccagtccatgatttcacatggtccccaacttcgagacagtttggtgttattgctggttacatgcctgccactatatccttttttgatttaaggggtaatgtagttcattcgttaccacaacagtcaaagaatactatgttgttctccccaacaggtaaatacattttaatcggtgggtttggtaatttacaaggttcggtagaaattcttgatcgtcataacaagttcaaatctattgccaaatttgaggctacaaatacttctgtttgtaaatggtctccaggtggtgaatttattatgactgccaccacatcaccaagattaagagttgataatggtctcaaaatatggcatgttactggttcgttgatatttaacaaagaatataaagaacttttgaaagttgactggaggtatccatgcccttttaaattaatcaacggcagtgattacattgtcaaggaattttccatcaaggatacagttttggaagaaatgaacgataaacttgatccaaaattaagtaaaaaccaattacaaattcaccctagtgccgtgggcgttgttgtcaaaaagaaacctgtatcttctggaagtggaaaatctggtggtggatataaaccacctcatgcaagaagagctgccgctaatggaggtcaaagagtggtcccaggttataccccacctccaggttctggaaatcaaaaaaataaaaaacaaaatgcccaaacatccccaaagagtagtacctctacaatttcaccagaagagaaaaaaatcagatctcttgttaagaagttaaaagctatagaaactttaaaagagagacagaagaacggtgataagttggaaattactcaggtacaaaaaattggcactgaagaatctgttagagaaagcttagaggctcttggctggaaagatgaacattagttgcatttgtataaacaataatcgcattaataacatgcatatatatatatatatatatacatatattattttaactgtagaataatcttaaattgtacaaaatacttatctactatgattaataagtcaccagcttggtaagcaaagttttgtctttttagctgtggcttaacaagtttatattaaaattagttgcttttcacaaaccttcaaattttcagtgattgagcttcagtaagtggatataatacagagtactataaaaaataaacacacattcaaaatttaatagttttgctacaatgtttctaccacatcatcatatttatttcgattatgctactgttttatgtgccagagaatacgttgcattacaacagatcatcttgaacgaagctacagtactttcaactttttttttttttcttctttcttacgatttctgataacaagaaaagaagaaattctatttaacaaaaaaaaaaataatttcctccaaaagcgcatatgtttagatgaaacaagatgatgctacaaggaaaaaaaaataaattgcaaagcgttttctacattttggcggctaactatatcacgaagatcaccaactaataacaaaagtgcaataaataagttttcttcattgaaatcatctcacagacaaaacaagaattgaatatagcacagttgaatttttccaatagaataaaaattccagtgaatatatctttatttaattccatttatttgtgcctgttataatttaataaacacttaatacgtatacacacatatatagacagtttaattgcatttatctctcttatttatcaatatcctaatacttcacatagtcacgaacgagaacatattaagatgtctaacccatctttggcattgctaaaatcgaggatacaatatgaatataacattttaataacattaagtgacccacaaacaggaattagcttaggtcctatttttgaaaatgttgtatctcaagaagatgcacctggatatcatcaggtaatccgatatcctgtatccttttccacactaagagagaagcttccaaaatatacaaatatagtcgaatggattattgacgttgctttcctgccttggaatgttaagaaatattatgaaccacaatcggaatattataaatatgccaatattattgaaacccatctcagaaacgtcatgatgcctcgattgaaaacttactatccctttgtcatgtatccagatttagattctttaacacagcaacaacaagaagaaaaaaataagaaaccttcatcaaatatacattcagataatactacacagaggttacccatactaaaacatagtgatatagcaacttataatcaaaatttgaactataataacagtagaaatgcgttaataactcacaataatgtaaatgtcattgctggaaactcaaccttcccttctgacctgaaatataaaagagctactttatctctaggaacgaataatgacccaatatcttctccaaatcttgccaatgatactactgttaataaatctaacgcatcacactcacctaccaactctctagttccacaaacagcaacttctcaaacagctgataactcacttaacacgaatatagaaaaaaatattaatgaacaaattaaaactttcatgcattcaaaccaccttcagacaatctcctcacatatagatccatcacgtaatacatcgagcatatcagataataatttggatccgtccacttatttgccacagttattaactaatgacatgctagatagaagaccttcgtcgaaatttaaaaagaaaattattaagcgtggtagaccaccttcaatagacttcccttatgttcaaagaatgagaaacgtcgtaaagaatataactagaactgcactgattggagtaaaagaatctgtgacggttgcattagaaaaattacccgataaaacagatcatccagaatattattcacaaatttctaatccaatatcatttgaggatataaaaaagaaggtaaaaggacggaaatacaaaagttttgattcatttcaatctgatatcctgttgatgataaataatttcaaaaaatatttcgaaaatgatcctattgcaattgataaaataaaccaattccaaaatgcttataatagtatatcacaacatgaattagcaagaccagataaagattacatgcctgaaggtgaattcaaatatcctctagaaaatgcttttctaaataatacaaaatataaaatcggtgactgggtgcttatctctaatctcaatgatgcatcgaaacctattattggccaaattttcaaaatatggaaagatgagaaggatgaagtttggtttaatgcatgttggtactttagacctgaacagacagttcacagggttgatagactattttataaaaatgaagttatgaaaactggacaatatagagaccatgaattaagtgacttacttggtcattgctatgttgtccattttactagatatcaaagaggagatcctgtctttgagaatagtgcaaatgatgtcccgttgtttgtgtgtgaatttcgttataatgaaaatgataaaatttttaataaaattagaacatggagggcgtgtctgccagaagaaattcgtgacatggaggaagaaactaagccagtattaggaaggaaattcttcaaatatgcatcacctttaaagcatctattaccaccaaatgctacggccaatgaccctattccagagcctcagatgggtaatcctaatgctccacccctccttggtgctgtatacataggccctgtatacgccaaggatgacttaggtgaattctccacttccttagactgtccaaaatatattattagaccaggcgatccttatgaagagggtactatagatgaagaacatggtttattaactgtagatccttcaaaagtatctgccataaatcagagtcaaccaaaatcaaattctccaattcctccacctggagtacaactatctactcacaatagtagacaacatacacctaaaaataatggttcgacatcatcattgaaatctttaaagtcagaccataaggttaaaaaatcttcttccaagatatctactggtttacagagtcttaatcagattgtgtctcaattcaataagaaaagttttaataaattgatgcaacaaaagacaaattctgcaaatataatgttaaccaaaagtaattcaatgaagaaattgactaataagacagcacaagaaatgttttttcagtttagtacacagaagaataatttgaagtctgtacccattacttccaatggtacaaaacgtggtaatccaagtcataatatttcgattactgctaccaataatattggtactaatattattaatagtaccactaatattactgggggcaatacaaacatcaacagaattcacataagtaataataacaaccataacacaggtactctccccaccagcaacaataataatcacgatagtatgatgctacctaccaaacgtggccgtgttgtacttgatacacccaatgcatttttattccctataacaacaaagacgagtggtggacagattaaaactaatgacgtaaattatatacatagtgatatcgataagtgtgtacagagagctgataaggggaaccaaaagagaaggttaagtaaagaagaattcagatcaagaaaaagtacaaaatatggcgaagtaatatggttcaaaggatccagtttgtatttaagtgaaagaatgatcaatctaggtaacaataatattagtggatccccattagacacatatgcccatgtctctaaagtagtgaatgctaataacaacaatagcaaaagtactgatagcgatgatgttaggttcaagaatttggattatcaagaagttatagaagaaataccggaacaaacttttggatttcaatctgatttgtcatgtaacctagcgttaaattcaaagtttgattataaaattatctcatcaccaattaaaatcaaccccgcatataaagtgattgaagatattaaaaatgaatttccctcgacctcaatagggcttcgaccatcaagtagttacatggcgttcaaattgcaaaaataataccaccataaacaagagtaagaaagaaagacgtatttctaattttttttactaagattaataacaggacaaaggcagaaccttaatcaatactgtttttaaacaattactgaatccttctatgtgaatttatgtatgtaaatacacatacacacacatatatatatatgtttgtatttatatatataccatgatatattgttgtccctattctcatgaactgtctaacaaataaaacttttacaattttcacattcatcttctaaacctacagtaagagacgttccaatgttttcttaacattcccccctcacttcctctttagtgggtcacttttctgacaggagcaacaactaattactgccacttataagtaaatgagtgaacagagaaacaaaagaaaaataaaggaatcgaaggagagtcagatgagggaagtcaaacggagaggagaagaagtcaaacccgagtcagaacctacaactaaagaaaataagaaaaatacgttaatgaaatcaaacaaaaatattgaaatttctcgagaagttttgcagtggacggtgcaattttccaattttcatttttcagttttcttctcttctcttttcttttttttttgtccttttctgcctagacctgtgtattggagacagtatttgctatatacatatatataggacccaactgagatgtacaggcccaacgaactagaagagccgttctgtgtactctgatgtcttgcaagaacttgttcccaccattgattactatacaatcgttgctcaagctattctaaccatacaccttaactcggtctaaagataacccgtttaataacgccagctggtgatattgtatgtgatctaactttattattaaatctacttgggaaaaaaaatacatacacaaaccaaatgtctgactttgataaatatgctactccattatcctcaagatatgcttctaaagagatgtctcatgttttctccttaagaaacagattttccacttggagaaaattatggttgaatcttgctatcgccgaacgtgaattaggtttagatgtcattaccgaagaagccatccaacaaatgaaagaccatttaattatcacagatgaagaaattgctgctgcttctgcccaagaagcaattgttagacacgatgttatggcccatgttcatactttcggccaaacatgtcccgatgctgcgggtattattcatttgggtgccacatcttgttttgttacagacaatgctgatttaatctttttaagaaatgcatatgatattgtgattcctaaattagtcaacgttattgatagactagccaaattcgccttggaatataaagacttaccagtcttgggttggacccattttcaacctgctcaattgacaactttaggtaaaagagtcactttgtggatccaagagcttttatgggatttaagaaattttgttagagctagaaacgatattggactacgtggtgtgaaaggtactaccggtacacaagcctctttcttagccttattccatggcgatcatgaaaaagttgaagaattagataaaagagtcactgagttattaggatttgacaccgtgtacccagtcactggtcaaacttattccagaaagattgatattgatgtcttggccccattatcctcctttgctgctactgctcacaagatggccactgatattagattattggctaatttgaaagaggttgaagaaccattcgaaaaatctcaaattggttcttccgccatggcctataaaagaaacccaatgcgttgcgaacgtgtatgttccttggcaagacatctcggatctcttttcagtgatgctgtccaaactgcatctgtgcaatggtttgaaagaactttagatgattctgctattagaagaatctccttgccaagtgcatttttaactaccgatattcttttaactacactattaaacatctcttctggtttagttgtatatccaaaggttattgaaagaagaattagaggtgaattaccattcatggctacagagaacattattatggccatggttgaaaaaaatgcttctagacaagaagttcacgaacacatcagagttttatctcatcaagctgctgctgtagtaaaagaacaaggtggcgataacgatttaattacacgtatcaagaaggatgaattctttaaaccaatatgggaagaattggactctttattagatccatcaactttcgttggtagagctccacaacaagtggagaagtttatccaaaatgacgttgccaaggccctagaaccacatagacactacatcaacgatcaaaaagtcgaattaaatgtttaatttcaattaaatctttataaattcatttttctgttttaaaaagttctcaattgctactagataactttttctctctctttctctctctctctctatatatatatttagataatgcatgtacatgtaaaaaagtaaaaaaacaactaacgaacagaagatcaaaatcgttaataatgtttgtttaattaattattactctttcgaatgtttatttactttggagttgagtccctttatcttcattatgtgttgggtactatgtttaatttaaacccagatttgctaaatactcttttatgatttgggcttttatttttaaatttttttcattatatgatgctcaacaagtatcgtcccatacatgcagatactcaaatatatatatatactttctgtaaatataataagtgaatagtgactaataacaacggtgaaacttggggtttatacgaaactaaaatagtgtgcctaattttttgaagaagccataacatctctatttactcctatatacataaaagcaactatttaatccgctgtgcttctctccatttataaaatattgttactattgctactatttttgatgttgaatcaacgttctgagatactttgattatgccttgctatataatgaaaagaaaactacgacatattcaatctattggaatctataatgtatgcacaccattaaataaagatactacaactaatttcattaaaacccatgcatgctttttcacaattgaaactactaaaggtgatataatatatgtaagtgaaacccagcagacaacgctatgtaatgttcaatttaatgcaatcaattttgatggatgtccattagatcgtttcatattgaaaatatttacagagtatcccttagcggaaccgttaagattaaatttaaataaaaagaatgacaaatggaatcaagtcgctttatattctatcaatcttaataatctaaatgttattaatattaacaaactttcttctgttaagggtattattatacctatacttaagatgtctgacggatattttttaccgaatcaatttaaattaggcatacaagatcataataatcaatttgcaaattataattcatcaacgataaaaaaatctttcaactacaatagcttaattaaattaaataaattagttgaatatcaaaaacaacttaatcaagataagcttaatttatcgaaaagtatagaaaattgcttaagtgattataaatttaaagagttcaataaagaaagattaaaaattattaaaactttaattgaaaaaatcgaacttagattatctgaaaagagagcaaagataaaaagtttaaatctagaattatccaaatgcaaatcccaaatttccttaccatttaaaaaacaaagttccaatgttacaatcgaacaagatgaatatggtaacacttactccaatttaatacaattaaaagataaaataggcaagattaagtccaaaaagattcaacacttggtaacagttttcaataatatcccgtttataaataacacagatatcaattttttccaaatggttactaataaatcaccaaataatatgtatgaatataccttaaaactatttaatatagattttgatcatattttaacattatctcaagaatctcgagaaaagagaatcaaagcaaatacacaattaggtagttatgtattattactattactaatcagtaataaaatcctgaatattcaaataccatttaatatgtcctattatgggagcacctctatgattaattttcactatccgttatttataacccatgttcaatctactaaacacttaaatgaattcaaactaggcattaatttattaaacataaatattaaccaaattaaccaattccttcagaactagactgacacgtttcaatattgtattatatacttctatagtctttaattgtacttatgaatatactcaggttttgatatgaacacatataaaaaaaaaagcaaaacaataatgttaaaaataataatatgctatgaaatggaaaaaaaaaatgcaaacagaacctatctatatactttgattattaactagtatttggaaatcaaatatctcttcaggtgatccattgagtcttttccatgatttgatagatccaactttagtgtccaattcatatattcgtattcttctttcagtgccaccgtaacctgcatacgcacgttctcctgcactaccaccataacataaccaaatgttgtgatttggagttgaatcatctttaagacaatagtcattacaatgatcgtggccacaacttgtcacctgaacctccattgaatctaatgccattaatccacccgagttatacttaggagcagtaacaccctctttaaaagtaccgacgatttcattaactgaatctggattctttttagatttctgattcaaatattccggtagtggaatgtggaaaaatgccattgacaaatgatttggaacctttaagatgtcagatttcaaattattttcatacaccttttttatatgattccattgtttttctttaatccaatcgtaaccaggtgacaatttacttgatttagagtatttatgagaatcaagaaaatacaaagttatcaaaggcaatccatcaccatccgcggaatcatttttttgtttaatttgtttaatataattaccaacaccaaaagtgttatcctttgtatcgaatccactgaattgaaaaatggtgtatggtaatctaaccaccaattcagacaattgccatcttgacaacgaaccttcatcatcatgattgccccatgtcaacgcccacggtatctttctttcaataactggacttattgcttttaatagtgtggtctctgaatcctgtaatgattcctggcccattatttgatcaccagtaaatactactaattggggtttttctatatcgagaactgtatttataaaatttaatgtctttggatcagctctacaaggttctgtatcacgatttactggtataggatattcatccaagcatttaccttcatttatacccatatgtaagtcagataattgcacaattttgaattttccatcttcattcggatatagttcaacatttttccaatctgtattattgccattatcattaccaaaaatagataatgggactaaagttttatatgagagatatgaattagctaaataatgatcgtagattgctgtgctttttattaaagtccaatcaggtcttggatctacacaatcgtcaccaaacaatatagtaaagtcagtaataatactgtttatctcaccagatttcaaaagatcaatagttaaatctattggttccagaagaaacttatcaaattgaatatatttattattattgttattttcattatcattggatataagtgaaatagatttaaaaccttttaaaatcctcgggttatgattattatcattatcatttgcaaaatgtagtattaatggaattatatctggtatatttatagtatcataaaaatagtataatgagctaccgaaccactctgtctgataggaaccagttaaatctttttctactattcttctttttgtaaaatatgagattatatctatatcatctttattcatattattgctattaggaagaggcttttcattatcaaacaattgatacatatgaaaacaccactggaattgtttaaaaatatgataacaccgtttcatcccaatattagtcattaaatgatcatttgggtcccaatccagttggtctattaaataatcaacattatattcttccttaaatacgaaccgtacctgttgatatttataatctttaatccaatattttagtaaataatggtttagtgtgaatatagagagcataatgatagacagataagtgaatactctgatatattttcttgataaaaataacatcatacatcccttttgtcaatagaaagatacgataacagacacagtaacagtaacagaaacagaactaataaataataaagacaaaaacaaaaaaaaaaaaagaaaagaaaaagatgtctatctatttttctacttgctgatgtcaaaccttctagccaagttgaactgatttattgaggatatgtgtatctatatagaagctaaaatagaacgctgatatgatgttatacttgaaatgccttcttcttcttcatcactatcatctttctaaactttgcattgaaaatgatatttctctatatacaaacaaaaaaacaaaaagaaacaaataaataaacaaataaatacttaaaactgttccggagttaactttgaatttatttcagataaacaaaaataaatgcagggtttatatattcatgccaatattttccctgcataccacatcaataaatacagggcttgtaatcaaaaaaatcgaaaaatattaagaaacggaaaatatcttccttttatttttgttgcttaaagaaaaatttgagaaaacaggaaaaggttgtagataaaacaaagaaacgacctaccagccactatttatcaaaattagtagaatttggtagatgaccaccaatttgtaacaatccaccactgttattggtttccttattatcattattattactagaattgttattgaagtccctatttaaaggattgccgttaaactttcctaaatcatgttgaaactgtttactaacagtccttgcatgtggacgtttcaactgatcccaactgatttttttctctttgccagctctatgtagtgttatgatattcccaatatcttcatcactagtaggattactattagcattaccactgcgattatttgtggagttgagaccaccttgattttgttttgttcgtgattctttttgatctatccctccttgcatgatagcaataattgtatttattagaaggaagtataatataagttttgtaatatagtggagcagcgtcttgcaaatatagaatgtagctgtttcaaacgtgaaatggatatctctatctgtgtatgtgcacagttctcgaggtgtttcttttatttattactaatctgctacgtttatgtataaatataaaaaatacgtagtagctgatatttttaatcctttgtagctatatatatagatacactttcatagatcctgggagggaacattccttagtaattaaaaaaacaaacaaacgaacaaatcacataattatacatataaacaaatatatatatatatatattatctaaaaaaaaaaagggaggtttaaagatgcttttaaaaggtcgaaaattaaatgttcaattttcagttttcagttaggcaaagaatagaatctacaagaaaacatgtgtatggcaattacactgaaaaatagtcagatatacgtacatatatatgtatatgtatgtatgtgtgtatatctatatgcattgctgttactgtgaataaaaaggatataaaatatagcaaataataaacgacacaattcacaatgaattcaaagaacattgatcatcagttcattgaacaatttctctctgatatcaattgttcacaatatacatcgaatttcattcaatttagaatatttgataaagaagatctgtatcacatagataaagagattctatttgaaattggtattagaaatctgggtgatagattacgtatcttacgcaaaattaaactattaaatgatgagaatgacaataaaattctaaatataaatgaactgtctaatataattaataagtttcgccaattaggttctttgaatcaacattctagtaactctagttataatcacaaatacctttctgattttaattataacaatcctgaaaatttggatgatatcttaccttgtgatgaagaatatttcactgaaaaacatcatatcatttttatacttaacgatggtacagcaaaaaaagtcgatgtcaatggctgttttaatgctaattcaatcaagaaaaggttaattaaaacattgcctaaacagttccaaatcttagacaaaaacaaaaataacttaaatatcgaatcaaattatgatgtctttattgttgactacaaaaagaacgttttacatcttttatatgatgttgagttgattacaatatgtcactcccttgatagatgggaaagaaatagattaatctttgtttcaaaggaccaaactccaagtgatttggctatattaacatcaaaaaaaatttacttaaaaactttatcattaactaacaataatcaacttagaggttcaaagaaagaaaagatttataatggacatctaaaaatggataactctaaagataatattagaaaagtttttaatcaaaggccttcaagtgaatatatcacgactaacttaagtgggtattttcccaataccaatattgaaaaactacaaaaaactttacgtaactcatatagacaatcaattagaatgagtcatttgcacccaatgaattataaaccatctatcattagttctgaatctaataatgttggcaatatccttttaaaacataccactgatgttgataaggctttattacaaaatttaaataatagtactactaatattcgtaatagaaatcctaatactagatcaaatattttattccgtaatcatgctacttctagcgatgcaaaagagcttcatttaaaaaataaatataaagagagcaatatgaattcagaagcatttaatgatagagaatataatgatgatgataaagtggaagaggaggacaacaaagaagggggatatgacactgatgttgtatcattaccaacaaagatggttacgcctaaatcttggctaaaaggcgctagaattggatctggtagttttggaagtgtttatcttggaatgaatgcacaaactggtgaaataatggcagttaaacaagtggctattcaaccaccaccatcgactctatcaacacctccaggcataaataattcaaataaaatggatccatcattaattaaaagaaggaatgaatcaaatattttcaaaaaaatggtggaatcattacaacatgaaatgaatctattaaaagaactacatcatgagaatattgtcacttattatggatcttctcaggaaaatggaaacttaaacattttcttagaatacgttccaggtggttccgtttcatcgatgttgaacagttatggaccctttgaagaatccttaattactaattttacaagacaaattcttattggtctgacgtatttacataacaaaaacattatccatcgtgatatcaaaggtgccaatatattgatcgatatcagaggttgtgtaaagatcacagattttggtatctctaaaaagctttctcctttaaataatagcgataatgatgctgaagattcaatgaataagaaacaaaataaaagagcatcactacaaggttctgtgtattggatggcaccagaagtagtaaaacaaactactactacagaaaaggctgatatatggtctacaggttgtgttgtgattgaaatgtttacaggaagacacccatatccagatttttctcaaatgcaagcattatttaagattggaaccaatatgtgtccggaaatcccatcctgggctacgtcagaagcacagaatttcttaaaacagacttttaaacttgattatcaaaagagacctagcgcaattgaattactgcaacatacatggttggacactcatttgctttcctaaataaaagcaccaaattcagaatataggataatgatacaactaggtcttatcagattaaaaaaaatccctgaatatatacttacttattattgatctactttgatattaacacatacacatatatataaatatacagatttatcgctttgatgaactttaacatgaataaagtcatgtaatattataaaaactatagtagatccattctactgaaaaaaatcaatatactatctaccaatgtatatatatatatatatatatatgacccaagaaataaacaaaaactatttactccaggtttattgcttgtaccaacgattatgcaatttaataacacatcttgaataaaaatataaatatgaatatacgtatttgtattcccaccaaaacaaataaacaagctttaatgtgcatatggagatagccttaaacaatagagaaaaaaacaggtaataattttcaatgggttatcaacaatttgtaatacgtgtatttattctttgtttctcttctttttaaacaaacaaataaacagataattacaaaaaaacaaaaagaagaaaccaaagcaactaactaatattatggtgtccataatttaccacttcctcttgaagcataaatagtctttttaaatttggtttttacaatatcgttaccatcactagaaacctgcttaatcccacttcttaacactagatcattaaatcttctagtatctttaaaggttttgtcattaagatccttggataataaagaatcgacctgaactatggaacaatgtggaatatcacagagatcagcaaattgtcttacttctgaatcttccgtaataagaatccaacgaccttttgaattaaagttattatcaacttccttatgtatcaacttattatcctcagaatcttctatacgtttatcccttttaacattattcttcgtggaggaaacatctacatcttctacttcaataatatcatcatatagctcttctacttgtagttcaaatgcgtcatttgacaaacggcatttgtaagcacaactttttaataaatctttaaatcttttaggaatcttattcaatctgtcaatatgatgaatattaacttcagaccatggaatagtactcaagatatcttgatactccataataatctctaaagatgcttcgtcttgtatctgattagcaactaaactgtttttcaagttatgttgttcaatgaacttcaaagcctctctagcattattgcttcttctcctaaattgcaagaattctaattctcctacagtaaacgttggaacatataactgaatatgtactttctttgatttcttttgagtgttttttctactatttaaccattgatcccattttttaatattccctaaacctttttcaaaagcggatgcatcaataacaaaataataattgttaaccataatattatctgtatatgcaaattaaatacaaataattgccctgaactagttaaataatgaataattgatctgttattccttgttttctcttcttttccatatcacatatatactaaatgtgttaaaggtatatagatttctatcaaataaatttctttttaagtttaatgaatttttctgtatactcgaaaaaatttgttgacacattcaataaatagatgaatcaataaacagcatagacaaacccatatggtgtatatgtaacttttgctataatcgaacaaaagcaactgtaataatagttgtattgtgtatctgacaacaactggaaccattatatcttataaaattgaccaactaaaaatttcagtgaaggaacaattgaatatttactatctgtctgtgttgtgtaaaagatttgggatgaggttttagtggctacaatttgtatttctaaatattattactgtatatttattctccctctctttatttttctcttgctttatctctttggaatactataatgaattccttgagagggatcaatagttttccaatcgaaatatggaatcaaattttgttgaatctggatttaaaagatatattccacgtatctcggtgcaatcatcaaataagagatattgtaactaataatgtaatatgggaaaatatagtatatgaaatatggggtcaatatgaacaatttgacattttacaaaattatagaaataataaccaaacattccattcagttaagaaaaatcaacatgggactaaacaactctataattattggtacatacattttttggaaagaatgtacaatgaatataggtatcttaagatacttgatcaaatagttcagaatcagtggaaaataagttactggggtgacatatacaagctattacaagacgaagattttattttgtatgtaccattacttaatgatattgtggattcagaattccttacgaaagatatttactcatttagaccacagttcattgatcattatagagtcactagactaaaattattaaattgtttcaaatcgtcacttccattaaaaaaaatatcatttgaattgttatgtgggtttagacataaacttttgttccagtttatcctcttgtataaggatattagtaactatgatagttacaacacagatgttaatcatatttttttccttaatgatgatgactgtgaaaaattattattacaatataatacaatggatactgcgtttcatagattattaccatatagacatagattcttagaattgtttagacgaattctaaaaattagaaatagaaaccatcgtgtaaatttcaatagcttaactacattaaaaaaattggagatactatctaatttagtaatgaatctattaaaaagaagtatgaccagatttcttacaaaaaattatactgaagatttaatgatccttagagtgtatagtggtgagacgaaagggacattattaattcatttagctattttacaaaggattttcttagaatatgggatcaaatgtcagatattacaacgccatcttaagatctattgtcatactagtaatagtaatggtaaaaatggacaacattcagcttttttatatttaacagtgatgcaagattcgttacaatgtaaaatcttaacagaacatcaattaagaaccatcattggagagacacattttaatcattatatgaaaccactgagcaaacaagatgcacttagatggttgaatcatgaatttatatcaaatcccaaatcaaattttgaaactaatcaaattaataatatttttacaaaatgggatcaaatttattgtcacagtcatttacctttatccaatgctaagttaagagcatttaatattatttataattcattattttccaagagattttttaatgctggcttaaaattacaccacatattatctgattcatttgatattttcatggaaggtatgactccattagattatatcctattggattacattcgtatgagattcacagacttgaagaaaacagaaattaactatatgacagaggacaatttgctgttacatcaaacgtggttaagaaatcaatacatgattgaaaatatcagtcctaaagttagcataactcttcttcatcctccttctacggaagatacaatgataataatcggtaatctttatacttttagtatcacttcaacgttaacatcgattgtctgtatcatcaataaggtacgtacaggaaaaaataaaaataatttgatagtagtgatggatatttttggcgatgttcataaggttcatgagaaagattttgttcaaaatattaaaaaaatgaattggaatactattgaaaaccaaaatcaattagatttgtacataaagataatgactataataggaaaattgggttttctatttgatcacattgaaattcaaagacatcaatatattctttcgccaaattcacctgagtgaaataataatttgaataataaaaaaagaaaaaactataatgagatcttaaaagctgctttgtagattcattctagtatatattaagtatatagatctaatattcactagttactcttatcgttcctcagacatatctctctgttcctttgtttatacaaacatgcgtataatgtatataattataattattatgtaagcatttattgattactaagatacattactaagactaaactctatggtggtttcctgtttttgttggatgactaatcaatcattaactcatagcattgaataagcgatgagaaaataaataagatatttctccattatttaaatatacaagcgacttctcacatttgtcttattaaatatgtttgtgagtgattataatttcatttcatggttcatagtatgcattaagataggaaaagaccacttgtaaatacagctaaaaccaattctttttcttcttcctttttttataagaaaaaaagagtgttttataacattgaaataagatttactatatttacatattaactttaagcaaaagtaaaatgttgatttcgagaattcagttattaaagccacttactaaacgattattacaccgtcaattaagttcaaaagtcattggtattgatctaggtacaaccaacagtgctgtggcatatattagagatttcaatgataaaaaatcatcagtaataattgaaaatgatatgggagaaagaactacaccctctgtcgtagcttttaccattcaaaatcgagcacgggggaattctagtaagagacagtctaagggtagcagttcagatattatagtagggacaagagccaagagacaacaattgattaatcctgaaaacacattttttgcaactaagagactcattggtagaacctttagtgatgaagaagtcaaacatgatattaagctgttaccatataagattgtaaagaacccacatacagaacaagcagcagtggtgacaacagatggacaaattaaatcacccggtgaaattagttcaatattactaagatatctaaagaagactgcagaagattacttaaatgagcaagttaaactggcagttattactgttcctgcttatttcaatgatgcacaaagacaagctacaaaggatgcagggaaattagcaggattaaatgtattaagggtagttaacgaacccactgcagctgcactaagttttggtcttgacacaatgaaaaataaggaggatagaaatttagttgctgtctatgatcttggtggcggtacatttgatatatcaattttagatatcgaagatggggtctttgaggtccgttccactaatggggatacacatttaggtggtgaagactttgataatgtaattgtgaattactttattgaacaatttatatcacaaaataaagatatgcatatagttcgtgaagagattattaaagatagagaattaatgcaaagactaaaagaaaatgcagagagagtaaaaattgaactatcccatacgaaagacactgttgttgaaattccattcctttacaaaaattatcatttaaaattatccatgaaagaggaagaactagatcaaatgacgcaacatctaatcgataaaactattccaccagtaaaaagagctttaaaggatgctgatatagaaccacaagatatcgatgaagtaataatggtgggtggtatgacaagaatgccacgcattagacatacggtaaaagaactttttggtggtaagactccaaacacaagtgtgaatcctgatgagacagttgctataggtgctgccatacaaggtgggatattatctggagagattaagaatgttttattgttggatgtcactccattgacacttggtattgaaacttttggcggtacattctcaccactaatcccacgtaataccacagtacctgtgaaaaagacagagatcttcagtactggtgtcgataatcagactggtgtggatataaaagtataccaaggtgaaagaggtctagtaagagataacaaattgattggtgacttaaagttaagtgggataccaccaatgcctaaaggtactccgcagatcgctgtgacttttgatattgatgcagatgggataatcaatgtctctgccagtgaaagaagtagtggccaagagaaaagcataactgttattgctaacactggtctcacagaggaagaaattcaaaggcgcgtggatgaagcaaatgccaatagggaacaggataatttaattagacagagaatggaattaatgacgaaggctgatattatggtcagtgatgcagaaaaatcttttaagcaattcaaaaaattgatctctattgatccagagtataaaaaattaaacaaagaagttcagtatctaagagatcaaattaccagattcaaaaaggatgaaaataatacactaattgatgtcaatgatgttaaaaagagaactgataagctacaaggtaatgtattcaaactgttccaaagggtaacaaataagtaagaaaataacatatgtgcgagtgtgttatcgaatctttttttaaaagtttcggaaatgtacaaagaatatagtagtatagcttcatatatacatccaatggcctctttctactgcacatattctatgtaatatctgtcttactggttaatcactaaagaatatttccatggtatatacgtgtatttattcttcaattattgcttttttcgtttatttttccttctatatttcgttattgtgtttttgatgtaaaaatggatacgtttatttattttttattctcgagaaatcgaaaaaatttttttttcaaacgctcgaagactgttttgattttgtgtttatttgtaccacatttaattattttttttatcgatggatgagtatggtgtctattccaagaggcattggatatttttaacgcttaatttagattttgtatgctatatttatggttatttctccttatgcttaatatgatttacctttgaagaactacttgtttcctatctcaaatcaaagactatcggatatcaatctaagaaatggatacttctgttaatcaaaccatggcatttgatgctgccaaaattttcaatgaattggtgaacaattttgactttgctgaatttatggaaaagaacttcaacatcactgaaatcccagcctgggtttctgttcactccccatctgttgatcatccatttggtcttgaattatggccaatattttctaaagtatttgaatctattgtaggttatccagcagaagattttgaatttatttacaacaaaactttcttagccaatggttaccatgctatcggtattatcttatgttactattttgtcatatttggtggtcaagctatcttaagagctgttaatgccaaaccaatcaaaattaacttccttttccaattacacaatttattcttaacttcaatttccttaattcttttacttttattagctgaacaattgattcctatgatctatcacaatggtttgttctgggctatatgtgctccacaagcttttgcaccaaaattgatcactttatactatttgaattatttgactaaattcgttgaattgattgatactgttttcctagtcctaaagagaaaaaaacttttattcttacacacctatcaccatggtgcaactgctttattatgttacacacaattgatgggtcacaccgctgttgaatgggtaccaatcactttgaacttaggtgttcacgttgttatgtactggtactatttcctttcctcgtgtggtattagagtctggtggaaacaatgggtcactagattccaaattattcaatttttgattgatttagtgttcgtttattttgccacctacacattctacgctaataagtacttccataatatcttaccacacaagggtacatgttacggcactcaagatgccgctgcttatggttatttgattttaacttcttacttggttttattcatttctttctacatcaattcttataagaagaagggtgttaagaagtctaaatccagttccaagaaatctgcttcaaagaagtcttcttctggttcttctaaaagcaagatctctggctcaaagaaacatgttaccaaggctacttctagaaaagcttaaattgaaattcagcaagaataaaaaaagtgaataaaaaatattgaaataaagtgaaaaaattagaaaatttatggatatttctagaaattgagatgtcaccaatttgattcaacggtcatcgttaacaaaatagacatttatgttttcacatttattttttttgttcctctatcatttttttaatctttatttatttattttgaatatgttatcttctttttattgttacgtagatgagtttgaatattgaaatgataacattgtattttatataacgtatatttataaaatgtaaacaaacaatgaaaatgtatgattagttttaagcacattatgtgtattaacatctatattatttatatttgggtatctacttatttcaacattctaattttatatggctatgcctttaaggtgaattacatactattcatggcaaaaaagaaaaaaacaaaacagaagtacgaaaacttcaaaagattctgatcagtgaaccaaataaaatcttgtgtattttatagtacatacttaataatataacgataaactaaaattacaaatatacatatataaaggattgtattgtataacgacaaaagagggatgatgatataataagggaaaagagaatgaaataatttaaagtcacaatatactctacaccaagcattcagtcatattgagctatagtagccaatgtatccacatcataatcaactttaccagcagaaaattgttcattgaataatctgatcttaacaatatcctctaaataatcatcacctagttttggaataaaattatttaaaaactcatattcaattcttctagaagttgaagattcagttatcataatctttaacagtaatctaacaattttacctgcatcattggccaaatattggtcccaaaatgcagtacaaactgggatatgaatatctaacagttggtctacttctgtcatgtcttcagtattgtttgaattatcaattatcttcttaaaatggccttcaacacgaacatatccagtttgttcacagtaagctttgtaagacaatggtacaatagtattaacggtagacaagtattcgtataaatcttcattgattatatgatctaagattgaatcaatttctgtttcaataatcttgttttcattgccattgaaaaatctacgattaaggttattaatattagtgttattatcatttaacaaattggaaccagaagttgattgattattatccccattgccactaacattactagtattattattgttgctattagaaataaattcgactgtaatgaatctcttaataatactacgaataatcttaccaaccttattaacaatttcagataaggatacagttttgaaaacgtattctagaatgtctctatcaaataaagtggcaggacagcagaataatgctaactgattcattttatcatccaataatgatttcttatattttagaagaacagtttggattcttctaaagatggtgactaaggtttgaatcttacaatcatcgatgatttcagtcaattgcttttcgattgataaaattgtaaaaaggatatagatgaaattcaattttttggtagcaccaaaaaatatgatcaatttattaattgatttaatgaaatctagtagtactgaaataacatcaaaatcaatttctttgaaattttcacattgtaaaccagtttgaatatttaaaataatttgtttcaaattaataaaagtctctaatgtggattgtgctgtcgaatagaaatatttgtcgaatctttgtaaaattgggccattgatctcattgaaagtatccttgtacatttggtcgaatctttctaactgccatggattagaatttaactcatcataaaactggctgattctattaaaaattgattgtgtgttattagaaatctttacattagaaaggtccacacaagcatccaacagatgttgctcagcgtcattagaatagtaatttttaggtttgaaacagttagcatcattttcattggctgcggatactgtcattgtattttgtgggtccaataatgagttgccagttataccattgccattactaatattattattactgtttactggtgtttctgtaaaagaagaagttacatttgccgatgtattattatcagtaaagatgggtttaacaatttcagatagaatagatataatacaattatggattggaatattatcaccatgtaagatattagaataacctaagtgacccgtatgagtcaaatctggtctagagacagtcaaggataaagttgacttactcaaagttggaatcctttgataagcatctaacaattgatttcttacagtgatggtattgatcaggttagatttagataattttaaattcaatgggattgttttcaaactgttgttatacatatcatagtattgtaaagagagaacgttaattggatatctttctttactcaatttattattccaaacatttgatgtcaatgaaaatagagtgatcttgttaatttcagttaagaagaaatgtaatctattagttaagaaattggatctttcagacaaatcagtagataaattgtctacatcgatgatcagttgtaaatctaaatcgtttctaacagtagtacgcttaacaatatcattaatttgattggagatgtatctaatagtagatttgacattggattggtttgggaaatatggtttagacaattttgaatataataatttcattgcaggatcattaatgaaattgattgataaattttgggatgctataattatagccattaatttagataatgggaaagaattttgtctttcttgaatcactggatccacagttttcacactaaatggtacaatagaggcgataccatcagaatctacataattggtgttggtaacagtagtacgagcgttactattgttgtgactataattgttagtactattactattattattattgttgttgttgttgatattattagcataatagttgttataataagccataaaatcagaagaacttttattagggatgttataatgattctttaaaggattagtttgagcaaaaagttctggtttatcagcataataagagacaagcggatccaaacgatggatttttcttaaatgtttttgtagtttcttagtagtttgtaaagagtcattgctactggtgttatttgtagtattattggaatcattagaagaagtaaatttttccaaaatttcaccacaatgtttgcatttaacaatacttaaattcttatctatacccaaataatgggtccaaaatttagctttagtttttctaagaagatgaattggaacccattctcttattccatcaacaacgatttcatcactgacaaaattattattaggtaaagtggatctgtgcaaggtagcagctgcggctgcggctgcagaagtagtggtgatcgtagaggtggtggagttgttgtggatagtgttatcagttgtaattgtcatagaagcaacatctgtagcagcagatgaattaacaatagtagttttacttgtagacaaatcattattgacttgagtattcttcataatagcattaccgttgtcgttctcatcatcatcatcattctcttcttcttcctcttcttcttcttcttcttcttcgtcagcaggttcgtcatccatgtcactgaattgtgaatggttttgatcattaactttattttgtgtattgacaacagaagataatttattattagtagtactggtgtgatctgtagtaatacctgtgataggaaagttagaatttgggacagatggaacaccattagttgcggaaccaacatacaatggattattattattattattattgttattattattgttagttaagggtggtagaactaatccacctttgttagaagagttgtcatttggaatggatgaagagatattattgatactattaatattactggtactttcaccagtgctcatattgtttgtatgattatccatgatatatatcaatggtttatagtatgattaatatcactgaacgtatattaatttaatctagtgtatttttgtagatatgtgtgtgactatgtgactgcgttttctgtaagtaattgcactaatgatttaaaatgtaatataggatagatatgattaaaaaaaaaacaaaaacaaaaacaaaaacaaaaaataaaggtaactgtaatctttcaaatatacgtgtttcatttgtttattcttctaattcaatgtttaaaatgacacgaaagggagagagtgagagagagaaggaaaatagtgaaagaaataaaaaaaataaaaaaaccaaaaaaattttctgaaaattttcactcatgccccttttgatttcaaaattttgccaatcaaatgttagatcagtacttcatgaaccctacacaaccctatgtaactctcccatcatacttaatacgatttctaactcccatacagtttttggcagttttaggtatatcgttagacacgaatggaatcatcttgtttgctgagattcattccgcggggttttttttttctttaacacctgcaaaaatctgttcacccatacacccacatttccccacgctatcctctagattttttccttatgtcttgtttttgcttgtttttgtgttttttttttattgttttagttccaccgaagtttagataatgttgacaaaaatgaaaaaaaaaaaaaagaaaaaaagggagttggaccaacagccactcacaaaacaacgccttctacagtgcggcatttacacatccacagataacctaaacaggaaatcaagttgtagttacaaaataaaacaaaataaaagacaaaaagaaaaaaagaataaagaacaaagtaggaggcaaggttccagacaaagcactatttcttctattatcttatttccatttcttgtgtttccagtaaggctggaaaaataacggtactgctgtgaaaaaaaaaaaaaaaaaaaaaaaaaaagagaggaagaagaaaaagtaaaaagaagtaaaaaatgaaacaggaaaggttgggtaacaacatattagtttgtgttttctcaagaggcataattatttaaaattagggttttgtaaaaaaaatgtcttggaatcattttcatttaccatggatttcaaatacaactttcagataaattaaaaataatatgaaagatgatttaacagtaatttttatctccttgataaatttccttcttttgttggtgtttaataaaaaaacactaatacacattaggtttgagtttaaaggaaaaaagaataaaagcaaaggtactttacaagatgatagggctgtaatacattttgttataaaaaaagaaaaataacacttctgtgagaattttctcgaagggaagaaggagaagtagtagacaaaccgtcaatggtagaataatttcttacaagtgtaccttctactttccctttttcttttttgcttctttcctccctctctccccccccccacgctaatggcggtgacaataaaacaaacaaaaacaatcgacactaatcaatagatggaaaaaaaaaaaaacaaaacaaaacaaaaaaagaagtggaacggctgtttttgttttgttgttaagcagaagaaaaaaaagaaaaaaagaaaaacaagataagtatgcaagatcataatacaaataaacaaacaatatcctctcttccctcctcctccccctccttttcctccttatcataccgcgggatattatatgttgatgtcattagccaaatacagaacgatcaattgatgacaacaaatctttttgggtaatggttcgggtccatggaactctgaaaagaaaaaataaaaaaaaaaggacagaaaaagaagagtagctattatttcctttgtttttttttttattttacatcttagtgtgtttcattggattttttggactactatgtaatataatacaatacaatacaatacaaaataatataatataaaataacataatatactataatgtctagtaagtggtgtggtggaatgttaatgggattggcagtgtcaatgcaggagtatagacatgtgagaatacagtatgaggcatatagatgatgggattcagtgtgcataacttggaaagagatggttttgactgatttcgactagcaaaaaacattttccatgctctatatggttttgtccactttttcaacctgtcttcctgggacgtcaggttattgtgattggaaatatactacaactcaactaaccacttgattgtttttgtattgttttcttgtttggactctactatcttgtttctttttttttttgtttttttgttttctttgttttcatgtatatgtatatataattgcaaataaatatctatttatatatgtacaatttatatatatatatatacatatatatgtatacaggtatgtatggatcaagtggctggttagtaagcattacacttgaaaaaaaaaagagatttggcataagttgattagcgttgttgtttgcgtattcaaggacttttacctgtcacctgttttgtttttctttctcttttcttccttttatcatatgcttgttctttatcggaaatcacgatagtataaataaaacaaaatattatagattctattccattatccccatcgagtttggcttttgatcagtgctttgtccgtctttcttctaatttaaatatttagtatagtctgcattcatattaatgtcattaatactataccaagtattttaactatcactctaaatataattcataaatatcaagtcctttcatttttttttttttatttcacttgtcaaaaaaataataataacaagagcagaaaatctatagaatagataaatttagattattataaatatacacagatacatacacatatacatagagataagtgcaagaaattacgataaggaacatgtctaatacttctttgcttaatgagttacatttaaacaactataacttccactcaataaataatataccgtcaactaacaatacccataacaacatgaatatgaatatgaacatgaacatgaacaatattcccttgtcaagaaacaattctactatatcactagataaatatcatgaaccatcttcaatcgaaaaatctaatttactgaagaaatataatagttcgaatctgaatttaaatttaaatttaagcataacttcaacatcttcctccttagataaccaacagtccttatctagtcaactacattcttttaatagttttgctttacctcccatctcttctttcgataatttagttagagctgctgaaagacaatataatagtagtaccataaataataataatattaatattaatataaataatgttaactctaatagcaattctaatttatctaatattaacccgcttttaagaagagaaccattacataaagaaatcatactgaaaaagaatgaaaatgcaaatggtgctaaaaagataacaggtaataagataaataagccaagaagaaaaaaacaatgtcctatgtgtttgaattattacgctaacctctccacgcataaatctacccatttaacccccgaggatcgtcctcatcgttgtaccatttgtaacagaggctttgctagaaataacgatttgatcaggcatcaaaagagacactggaaggaaaataatcaaatagattcaaatatgagtgaacatgataaattgatgaccttacataaaattaagggtacttttaaatgccccttcaattcaactttgatccagttagacatggaaatgtatccttacaagtctcgtcctttgatgtttgaaacctcaaattgtcatcaaacaggtattttctctcgttgcgatacttataagaaccatttaagagctttacattttgagtatcctcctggaacaaagaaaaaggatagaaactctactcctggtagatgcagaaattgtggtgccaaatttaataatgctgatgaatggttaaacaatcatgttggtgaaaattgtggatatttttatcactaaacaaaatactcttttatctattcctatatatatgtatatatatatatatataccctaccttatttatagaatttttttcctatgtttattaatgtaataatgcaaaatactttatgttcagaaaagaatgatcctttatacggtttcactttaattggtgaaatttattattgtcatacactaatattgtttccatattatttaaataataaagagggattctcgtaggatacttgctcatgccagtcgcatccttaaaagaaattgtctttacccagcagccatatttaaattgtatcctttcaagtactttgcacaatttgttgaatagttttaaattttctggatcaaatgaatatatggataaattatcgataataatgccgtataagaccatatctttatagttatcaaataaatattgacccatcagtatctcattatcaagaaatgctattaaattttggaattttatatacttagaatctttgatgatatgaatatcagttttccgtaattgatcctctgccctatcctgattcctaacattatcgccccatacatttagtagatcaatgactaatgtcagtttacaagtgggtctattacttgaactggtttcagtggttgcaagttcttttcgttgatgtatccattgataagatttgttttttatttcgtctagtattatatggaccaaaccattatgagctattggttctttatgtcgtggaattgtaatatattgagaaattggatatatcctacaatgtgctaaaatgtccatgtttaatatattatcaccattgatttatgtttaacttctttcttcttctttttatttctatttctttcattttaagtggatatgtttgatggatttctttgaaacataataatcattatcactaaaaaaatgtagctgttctggtacaagtctactaattatgatgcttttatttgcctatgttttctttttttttttcattagacttagtgttaaataggaaagaattaaaagcaaatcaaaagacaaaaagaaaaaaaaaaaggagataattaaatatttatctttataaaaaatataacaacggccgaaagaatatattagacgagtaaataaatacagaaatgtgaatataaatatgaatgtgaatgtgaatgtagatactaaatagtcaacaataccaaaaagcaataataaaatacccatgtacaattagtttttaccgatatgagccaaatatttgttaacttctcttggagaaccgatccaaattgaagttctgtcatgaatatgcgttggttttaagtccaggattctttctcccttgtcgtttacagcaagaccgcctgcctgttcaaccaacattgccataggaaacgcttcatatagtaatcttaatttaccattaggattttttttatcaccaggataagagaatagcccaccgtacaggaaagtacgatgaacatcagctaccatggaacctacatatcttgcagaatatggccctattgtcttccactctacttcatctttctgtggatactttaaagtctcgataaaggatttgatttttggagaccaatgatatgagttaccttcattaattgaataaattggacgatgttcgggtattttcaaatttggataagttaagatgaattctcctaaattattatccaacgtgaatccgtcgacaccgtcacccatggtcaacattaaatgagtggatgaaccatacatggcatagcatgcaccgcacatttcccatccgtggcgtagtacatcacttgttgtaccttgagaacctggtaacattctgaagatagatacaatagtaccgacagagacacctgcatctagatttgaagaaccatcaattggatcgcaacagatagcatatttcgagtcgttaccttctaagatgattagttcttcttgttcttcggaaacaatgcatctaattattccgcttgatttcattgcattaatgaagatttcatcacctaagacatctagttttttctgttgatcaccagtggaatttctgtcacctgttataccgattaggttgatcaattcggcttttctaatagtctgtgaaataaatttaaaggcaaattgtaatgcatttaacacttgagagaagtccccctttgcatttgcgtgcattttttgattttctaaaatgaatcttggcaaggtaatgatatctgtatcaacgtcaatatttggtttgtaatcactcttttgtgaacattttaagccccttattattttgtttctggagtcattatttgaatttaatagagttgttgatgggacaggcatatttgttttactaaattaatataggaatattgattttatttctgaatggtgaatgtgaatgtggatgtggagatatgctttacacaattataactaaaaatatttggaggtgaggggagaaggatttgtttgctatggttatttatatggaccagtgacgtatgttggtaatattgacaattattctactagtacaaagaaagaaagagagaaaaaggtgttatatatgatcttaggaatactagattacacacacacacatatatatatatatatagaagatttctagttatttgaaggtttaagaatagtaacccttcttctccttttataactaatacaataaaaacaaataaaatcaaattaaattaaattaaatcaagaagtctactactggaaaatagaataaaaaataaagcccttagagttctattggtttaagtaactattatttattctttgttcctttgaacaggagaatagactattatcctaggtttttataaaagaggcgatctagttgtagacaacaataattggttagtgttatttactactgtttgtgccatgtatggagagaaaggaagcgttaatgaagagatattatttcgttttgctttgtttcgcttttgcttttgacattgttataatggtatgttttccgttcgtccgaaccagctgtggatcgtggaaaatcagccagaattggaaatatttatttgtttatttgtttgattcttaatttctcttatttttattttaatgtgtgaggatatctgcctttataaaatagagaacttgaagaatatggtaaatttttagtgaagaaacattaactagctgctcacatttgacagagtcactatgtttttacaaactgtacagtgatgcttagacaatataccttattctccctaataacgtttctttatgattagtgtatggcaccgtatcaataaaagacattgttgaatctgtgttgtaaacgctgatgttgtgttatctaatctattatatattatatacaagatcaccctttataagttctataattttgtccaacgtagcttttcaagtatatgatcttgcattctcaagggttttacagcataaataagtgaaaaacgaaaaaaaaaaaaaaaaaaaaaaaaaaaagcataaaaaagaaaagtaggaacataacagtaaccctgaataataaaacggaatttatcaggtggtaacttgttaaccctaatgaaaagttttttggttctagggctttcgttcttttttttcattttgtatttttttttatttttgtccctttgtttgtttgtgagttcgaactgtggtttttttttttgttttgttcttttcgtgttttattttttttttttgtttttttatcgctccatcttcaagaaagtttttttctgtttctttttcttgtttttagatgttgttgtccatatcgaaggggaaaaaaaaatgaaaattgaaaaataaataaacagaaattggaaagcaccaaaaaattcgacttctttagttgtatactaactttgcttgtttatcttataagcacgtagactaagttgtactattctcaattattatacttctatagctactgctgcagatctcttcaaaaacacctagttctaaggaaaagttccgattgatcccattaagctacatagattcgaataggagataattgcgtctttttttttttttttggttaactctatttcccttttgtttctttcacttcactattatcatcctttttttttgtttcttaccttatataactcatccattcattattacctccccctctactttggattacaaataaataactgtcgaaatagaaaaaaaaaaaaaaaaaaaaaaaaaaaagaaaacaaattacattaaaattcaataaatatattagcatataatattcagatcataacttattttcacaatggctggtcgtatccttgatttattcaaaccttttgaaccattcttaattgaagttgtcgcaccacagagaaaagttccttataaccaaaagatcatttggactgctgtttgcttactgatctttttaatattaggtcaaatcccattgtatggtatcgtctcctccgaatcatccgatccattatattggttaagagccatgttggcctcaaatagaggtactttaatggaattaggtgtctccccaattattacatcttcaatgattttccaattcttacaaggtacacagttattaactattcaaatggataacaagcaagatcgtgaattatatcaaatcgcccaaaaagtttgtgctatcattttaacctttggtcaagctttggtcgtcgtcttaagtggtaactatgggaagccaagcgatattggtattgctatctccttattgttgatttttcaattgatgtttgcctcttttattgtcatgttattggacgaattgttatccaaggggtatggtttaggttcaggtatttcactttttactgctactaatgtcgctgaacaaattttctggaaggctttggctccaaccactatcaacaccggtcgtggtaaagaattcgaaggtgcaattattgcatttttccatttgatgtcagttagaaaggataagaagagagcattagttgaagccttctatagagccaatttaccaaacttgttccaagtattggctaccgtttttgtgtttttatttgttttatacttacaaggtttcaattatcaattgccagttagatccacaaaagttaggggtcaaattggcacttatcctattaagttgttctacacctcaaacacaccaattatgttacaaagtgctttaacatcaaacgtgtttttgatttctcaaatgttgtatcataaattcccaaataacccaatcattgcattattaggtgtctggggtgttaaaccaggtactcaaggtccacaagtcgcattatctgggttatcctactatttacaaccaattgattcctttaaagaaatgctacttgacccaatcaagacagtcatctatatcacatttgttcttggtacatgtgcacttttctcaaagacttggattgaaatttccggcacttcaccacgtgatgttgccaaacaattcaaagaacaaggcatggtgatcaatggtaagagagaaatgaatgtttataaggaactaaagaaaatcatcccagtggctgctatgtttggtggtgctactatcggtgcattatcagttggctctgatttattaggtactttaggttctggtgcctccatcttaatggcttcaaccactatatatggttattatgaagttgctgctaaagaaggtggatttactaagaatttagtgcctggtttctctgatttaatgtgatcaggtattgagtggaataataaaagttagagaaaatgaaatagacatcccggatgatctcttccaatattgcgttattatcattttctttcaccttcgttattatctttgtttagtatatatatatatatatatttttattcttttttatatatttttttctaccttgttactactgtaagtaatatactacaagatgcttgttatacttagaaaggcacgaataacttactttcttcaaatgttatttgcctattaaaggcagttggagatatgactacatatacgggtagttctgataatacggtttactttaagcatatagcatgtggatgtatatatatgttgttttgtgaatgtgtataaacatttgctttagagaatttaatggaatcgtctttaatagataaaccataataaaacagcagctttgttgaattttgtattgtatttgtttcgtttagaacttcttcgagcattttctatttttatttttatttttttttgtttttgtttttgtttcattctttccctttttccatttttatttaacgaagaaaatttgcctataatgggaagaataggaagattcaacaataaaggaacagaaacatgtcgaacgcataaagaaagaaacagagagatcttatattatggtgtataatgtgtgtttttttttttttttgacagacattgtgcagctgttggttattaaactagcgtcttaaatatttaatatggcaattagctcaaaaggtgaaattttatcattctttgcaacctttcttatttgactggttgattggctgatttgttgattgattagcttaactagtttctctcctcacaaacgtatataattcgttaccagtattattaaggcattagcatttgtatattttcgaattatcacattatgtctgaactgactaccgttaaatctaactattcttcattgcccttccaccagcaactaattttgaaaagaatttgggcccatctcttcaatctctggaatgttcctgtttctggcacattatatttattcgatttacaaggctcgttatcagaacaagaaaatgaagattgcattggtgaaccattaaatgtgggaataaagcattccgaattcgaacacttggatatcgattcaggtgttttatattctgaattttgggatatgctaagagtggaatctccagattgccatcttttgagattcgctaaagctagaaactttcatattaataaaactatccacatgttatctaaaaatttcaaattccgtcatcaacatcaactaaataaattactaaataatggtgaatataaaattttcacagaaagagatgtgaacccaggtgttgttgtctgtttagagaaacaaaaggccgtattatttggccaagataatcaaggtagaccatacattctagttagacctaaattacattattcaaaagatcaaacgcaatcagaactggagaaatatgccctattaatcattgaaatatctcgtttatttatgaaggagggttcaattagcatattatttgatttaactgatttttctttatcgaatatggattacacaccagtgaagtttatcatatcatgttttgaggcgcactatccagagtccctaggttccttatttattcataaagctccttggttattttctccgatctggaatattattaaaaactggttggatccggtagtagcttcaaagattacttttactaaaaatatcaaggaattaactaagtacattgatttagatcagttacctacgtatttgaaaggagaaaatgattcaataaacctagataaatatactccaccagacgggtcaaaggataatttattacatgttaaagaagatgatggagatgattatgattacaaaaagaaaatgacagttttaaagaaaagagatcaattattgaaaaaattccaggatttaactattcaatggattcaaactaaagatgaatttgaatcacaaaaactttggcaacttaaatgtgaaattggtgaagaattgtgccaaaattatgttcagttagatccttatattagatctaggtcatcttatgatatcatcggtactttaaaaatgtaaaataatatagaagagtcaaaaaaacagatgttaaggatactattttattattttgttggtattctccttttctgtgcttaatgatagatttatgtttaaaatatataaaaacaagcacttgtatacacatacatacatatatatatatatggaatattttcttactatttgggtgtaatttattcgttatcagggaaggtttatacagaatttttctatatattatgtctctttaacagtctcttgctctttgtttgtctctttgtttattccttcctttagaagaaagaaaaagagaggaaatatgcataaaacacgaaataaagttgaaaaaataaacataaacaaaaatattttcgaagatttgatcgcttgacactttgcgattccatcgaggccagagatttgtctgaggaataatctttaaagactgtagattatgagatacacacagtgacactaaacactgttcgataatactttgttctcgttttatttagacaattcaattcgttcttttttttttttttgaatatataactgcataccacattactattatctaaatggcctatggattataatggtaagtccaagaatatacgaagcagttaatgaattgttggattcaaattatgctactcctcaatgggaaatagataaatacttaaagactttatattcaatatcaaacagacatggtatacctacagatcttttgccaaatcttttgaactttttattttacaatactgttgtttcaataaatacaagattaaagatcataagaaggaatttattaccaaatgattacatatcaaatgaagtatttcattttattattgtacgactaggtaatgcgaaggataataatattgacaaaaatattcaatgtgctatttgtaagtggttattgaacgtttacttcttatttcctgaaagaatacttgactctgataaatcaatattaatatatttgtggaagtatgaatatttacaaagatatattacatattttattgtgtggagtaccaatacaaaatatgatattaaactttggaaattaaatatgttagataaagcttcgaaaaaacctgtttattcatcttcagatattaatctgacattaatactaaaacgatatttgacactgttaggtaaatctgaggttttatccaatttattacaaaagaaaattaattcaggtagattacaaaaattacaagatttacaagctttagaatttgatgataagtttagtagtaagctaataaatgttctctcaagggaaaatccaaataaatttggaattgatataattaagaaacaccaaaatatgttattggatatgttaaaagattcggagacacatacaaacactttaagatatgacagaagaaaattacgtaatagtttgtctccattgtatgaagtgaaaaatatctcacaacttcagaaaaattggacaaaactaaaattaccaattaatgtagagactcttttcatggcacctcgtcataatcctgtgatccaattttatccaatggttgtagtaaataacccgaaatataattctaaaaaggaacagaaaatgagtagagttcaatatttgtattctcttaattcttgggttgaagttaatttgaaaagatgctttaatgatataacaatgttggatgaggagaagactccaataattaagactataatatttaattgccaaatttttgatgatttgcaaatgacagcaattgatacatttttaacgttagagaatttactatctaatgagaatattgtaataatattaataatgtcactgtttcccatattaaaacctccaatcaataattttctagactttagaaataaaatactgaaatttttagcaatttgtcatttaacatataatgatcaaagaaataaaaatgggaatagtaaagtatttcctcttatctgtagtgcacttctttctatgacacagaattggtttcttacatatcccaatgatcacaagattactgattttgcatttatattattggctgatataagaaaactaatacttgcaaacatgaaatattccatagaagatcgattcttatcaatgacattaattaaattagtaactaatttaactgagattacacctatgtataagacaatatcttctggtacagctctacattttgataaactagtattaaatagagacacaattcacaaaatggtattattggatgaccctttgatattaaatgcgtgttgtaaatatttaattaaaatgacggatgttttgatcaatcatcctcaatctggtaaatttattgaattacaaaatcaatatattttagatatcacgaactatctttggagaaataaaataatggaaaaacgtaaactttttaatattcctactgaatttctgaagcagattttagataattgttttttccctggcgttaagaataaagataaagctgtttttacaatcactggtattccggctatgtcatttatatcgattaaagcactagaagtaatagaaaagaaggagtacgttaaatatcattatgataggttattaacagaagaagattttgcattatttaaaaaatatattacagaaacaaacattgaatggatgtcaaatgagattgatctagtttcattgaagatttcaattttaaaagaaatattcaatatgcaaccttataatgaaattgcaaaatttttattcgcatttttaaagagtctttcaaagtataatcatgcagacaaataaatgtcaaattatttacaggattttgtatgtctatatatgaaaatgaatgtgtatcttatatatattttgtaaagaatcaagcatttttaatcaatttttttcttcttttttgaaaaggttctttcttttcttgaaagtaaaattaatgatattgttctttagaattattttatcataattcaaacccttcaaaaatctttgactatcaagtgatgacattactttgtcaagaacatattcttcacccttatcaaacaaatcacgttcatcgacaaaccagaatctggatctaccatttacagctacctgataacatttataatgccaatctgcaagtggatatacccttggccattcataatgattccattcttcaagtgttggttgcgcactttttattatcgatgcacattcttctgaaatacaaggtgctaccggataaagttcagtaactaattttctcaagttttgcataatcagtgaattcctaatttttccttcacgatgagctgcttccaataattgagtcatcttcatataatctgatataatagtgttaagcgataaatacttttcaaatgactctgttattcttctagacaatttctcaaattcattatggaaatttatttctacttcatttttatcatttggtttaatatagtcctgattaaaaatgtcgtcctttgcttcagctatatctttagtcaatttaacaacatgatctaaccaacgttcaacaccaacaatctttgtgtcatcccattttaacacttccgagattggactttggaaaagcatatgagctcttgtggcatcaggaccatgatttctaatacattcatctggatcaacaccgttatattttgatttggacattttttcatatgtgatagcaggcttagttccagtttctttaatgaaccattctgagcccctcaattcgatttcatcaggctttaaaaatctaccattatttgagtcaatgaaagttttaccgtgaaccatcccttgggttactaattgtttgaatggttcatttgtagcatgatcccacatgttaatggaccccatgaatttactgataaaccttgaatataaaagatgtaaaatagcgtgttcaatacccccaatataaagatcaatgggcatactgtcgttaattttctttggatcgaaaggtgatttatcatttttaggatctaagtacctgaaataataccaagaactgtcgataaaagtgtccatggtatctgtttctctttttgcatcaccaccacaagacgggcatttaacattaacaaactcgggaatatgttccaggggattaccacctttcttggggatcccttgaatgtcaggtaataatacaggtaaatcttcttcgggaacagggacagaaccacatgaatgacaatgaataattggaattggagttccccagtacctttgcctgctgattaaccaatctcttaatttagtcttactgactgcttttgcaataccgattgtggctaaatcctcaataattttctttcttgcttcgattgttgacatattaaaatatttttcggcattagattgcatgaatcctacatcagatgtatagggtggatctagttgagattggttgaagacttggtttttatcctttattctcttaggttgaatacaagtatagatgatatgtttagaagttctatcatcattattattactattccaaaaatcgaaatctctctgatcatggcctggacaacccataacagctgttccattttcaccataatcagacataacataaggcgctacaaagataggtatagactggttattgaatgggttaacagctgaaatatcttttattaggtaccctttcttagtatttttaggcaaagacggtaaaaggttaataaagctttgtaaatgtgggtcatttgcactgtatttttgaacaattggatgattccaagacaatgctaaatattggacaacaggcagagtctctgctcttgttgtatatacagtaatatagttgaattgtggatcatttgtcttgaatctgatatctgcaccttgtgaatagcctatccaattaatttgcatgttttttacattttctggccacaaagataaatgattcaaaccgttaagtaaagaagaggagaattttgtgatcccaagaaaccattgtttcaacatttttttctcaacaagagccccggacctccatgatctaccttttgaatctacctgttcattagctaagacagtcttgtccacggggtcccaattaatttcggcctccttttgataagcaaggccatttttaaacagttgcaaaaaaatccattgagtgaaacggtagtagtttggatcacaagtcttaacttctttgtcccattgaaaattagccaacatgtgattcatctgttgcttcatttttatgatattttgttcagtccagagatgagggtcgatatttctttcaatagcggcgttttcagcaggtaatccgaatgcgtcccaacccattggatgtataacattgtgacctctttgttgatagaatctatttagagagtcacttataacatatacacgcaagtggcccatatgcaacatacctgaaggataagggaacatggagagaatataaacattttttttcttacctggtactaaattgtttgaactaactggaattggaacacctttaatgacatgatccttccatttgtcaccgatcttcaataaccttaaagataatgaattaattgcagtagaggttgttgtctttgctaactgagagtttggcataactcataataaaaatggatcaaataattgtaatcagaaaaaaatgataaaaaaaacaaagtaaaacaaaacgagacgaaaaaaacttgttgtatatatagctatgtgtgtgtatgtaagatgcttgtctatctgtacataatcatccttttattattaaccatatcttttgatgaaatgatttaaagatctctcgttttttctttcttccctgctccttttgaacttttttataaaccaaaaaagatccgtacacccttctcttgtagatttttttaaatattttgaattgaacaactaagtattccatcctagcaataaaaatgcaaatataatagcaattgacaatgacaaataataatcatattttaatgcaaaatatagcatatctatctcggaacccagccatttaccccgtccccgtagtacaaaattattcattttgcaagttgatatagttttacaatatactatactgcacttctatataatgagctgtgtactacggaatattatggcttcttctgcacaactaaacaaaataggaagttggttagttgactaacttttaacagatatatatatatatatatatatctgttacaacacataccagaatgatatctgagttgaaatagccgcccatctttggcaaaactgtttgtttaaaataaaagacaaaaaaataattttgtggatgtatgggtgcatacacatcgtttaacacgaaacactgtgctcacgtgcttacggtagtttcctgtttacgcgttgttttttttttttgtagcattctattgtgaagtgttggaaaacattcagaaattattctgatctaccattattattattattattactatttctatacttctcgatgttgtgaatcaatcaacaaagtttaacataattctaggtaagccatattattctcctttcagtgttagatatttttacaattaaagaacagtatatagttgttgttgtcatttcttatttgttccgatcctttctcattttatcttgtccagttgaacgtacacacacacacacacacacaaatctatatatgtatatatacatgcagatgattattacaatattttaaaattactacagtgatgtccagttacaattcaaacaataaaaggtccatagatcaagtagataatgagttactcaccttggctgcccaacagactgatcaaaatgaacaaaatgacttaaaccaaaggaaaaaaagaagacgtcagtatgctccaatgacacagtactctaatagtgcaaacatacaatcagaatcaccactacagacaaagaaatcaaaaacagtctctgattcttctaacacaaactcaaattctgatttagacttccagtgtccttctggctacatcaaaaaaatcattttgaaaaatttcatgtgtcatgaaaattttgagatggatttcggtccaagattaaattttatagtaggtaacaacggtagtggtaaaagtgccatactgacagctatcactgttgggttaggtgctaaggctagtgaaactaatagaggtaattctttgaaagatttgattagaaatggttgttattcaactaaaataacaatcatcctagataactcttcctatggttcttatcaaatgggtacttttggcaaaaaaatcattattgaaagagtcataaaaagagatggaccagcttccttcagtttgaagacagagaatgggaaggaaatcagtcataagaaaaaagatattcaagccgttatcgattatttttctattcctattagtaaccccatgtgtttcttatcacaagataatgcaagatccttcttaactgcaagtactccacaagacaaatacatgcattttatgaagggcactcttctacacgatctcaatgtaaatttagaacatgctaagaagatttgcattaatgcaaatgaaaatatgtcgttgcatctagaaaacttgaagtttttgaagaaggattatgaggatgcaaaaactttggtcaaggaattacaccagaccagtaacctcaatgaaatgaaaagattgttacaggcgaaatcttgttggatagatatcaaatataacgaaaaatcggtattgaaaagaaaaaatgatatccaactgtataaggagaaattggatgatattgaatcttccatgaacaagaaacgagagaagattgaaagatatgaatcggacaataaattggattctaaggacattgaagccaaaaataatgaatgggaggttaaagaccaaaaacatcaacaagttaaagatcaattgagagcagtgagacggtcctatgatataacaaaggagaatattaatgaagctgagatgaaaatcaaagaatgtaatgataggattaatggattggataaaagtattcaacatctgaaagacgaattaaaaaaaagaatgaatgataataaagaacagatgagactagaacatacccgtttaactgatgaaaataaggaactagccgagttgctaggcaacctttcatctcagattcaagagctagaaaatgaagaaagaaatcttttaggtaggcgtaatgaagagattaaacagttagagaccacgataaaaaggaatcaacatgaactgagaaggattaaagatgggaatatctcctttttgagtaattttgatccaaggatggaagtgttattaaaacagattcaagctaataagacacgttttagaaaagttcctatgggtccgttaggtaattatgttactgttaaggattattacagagaatggactccgtctattcaaaggtatttatcatcaactctaagctcctttgttgtatgttgtcctgaagataatagaattttaagaactcttattagaaattgtggtataaaagcaaatatttcaattatcacttatagatttgaacattttaacattgaggcaacaaaaccacaggtcgaattcctaaccattattgatagtctagaattttcaaaacctgaattaaaattcctttttgttgatataaatagaatcgaacaagttttattaatcaaggaccataataaagcacgtaattttttaagaacaaaacctaaaaacgttgttatgattttatctcaaaatttaagtaattctaattttgggtttcaattagtaggtggttatagattagattcggtgtcttatgaacaacgtcccaaattaaaaatggggtccttatcagataacggtatttcttatattcaagatcaaattactgatgccactaatcaaattaaaaggattaggattgaatatgatgataagattaaacattaccaagaggagatcaatgaattaaaaagacaaagtaagaaaaataattataaaatccaagaaaacagtaaacagattacaaaattaagaattaatttagagaaaactgaggatactggtgttttaacttcaaaggagaatgaaaaggagaaacaaaaagaagctatttcaggctatcaaactgctatagaaagtttgaaagtagaattaaataacttgaaggaacaagctatcctgattaaaattagttacgatgaaacaaaaaatgaactcgatcagacaaatgctataatccaacaactaaatgaaaagattgagataagacatcgaaagattcgaaagcataaagatgatatagcattgtttactgataaaaaattgcaatatagtgatgcaattgaaaagattaatgataacattaaaactttacaagatgggattgaagtacaaaaagagaatgctcttaaatttgctagcgaagaggagctaataggacatgatttaccaaatgatcaagaacagattaaagaagaattaaataaaattgctcgtaagataagaaatgcggaaaaacaaattggtatgacacaagtagaggtactaaaccattttgaatccgttagaaatcaatataaagaaagttatgccaagtataagtcaatagacgaagctcttgtacttttacaacaatcaatagaaaatcgttggcaaaattatcaccaattgaaaaatcatacctgcttagaggcagacatggatttcagaaagtccattagaatcagaaatttttctggtaatttgcttttcatagaagattcaaaaagtctggaaatttacatattaacacccaatgatgagaaagtgagaaatgttgatacactttctggtggagaaaaatctttttcacaaatggctttgcttttagctacttggaaaccaatgcgttctagaattattgcattagatgaatttgatgtatttatggatcaagttaatagaaagactggtactgctttaatagtgaaaaaattgaaggactctacaagaacccaaacaattattattacgcctcaagatatcgggaagattgcagatattgacaaggcaggagttaagatacacaaaatgagagatcctcaaagacataataattcgaatttttacagcaaataggaatacttgggtttgttactttaaattacaataataatcactatttttcttttgcttttaccctgatagattttttgtaatattattataatttaattcatacatatcaccatatcttatataaaatgttgaatttatatattcaactatttctttttgctaaaccgggtgtttataacaatagtatatttgcgatagaagggtaaatcatgtctgttttttatagatcatgctttaaatttttatttaactgatatataaacttgaaaataatatacataaaatacgattcaaaataccctaaaattccaccaccttattacaagggaaatcggcaatttctggcacaggaatttctgggatataatacacctcaccattttcattgattctttctctatctttttcactaatagtaaaaatctctttgacattctcctttagcaaatcaatcaattctacaaatttagattgaatttggtgggcttgttctctcatattacgcctacacaaaccttcaatcagcatcatagcatctggttttgtttgatttagtctatcaatcaatcttcctattgattgaactaaatattcttcctcatatatcgtaccttttttaccacgagcacgtttacgttcttcacgacgcttattcttagctgtacgtctagaagcaccagtcttggctgttccacttgttttgccagtatatctagtaaaaaaggactctttagtagatgtttcagatggtgcaatagagacatcgtctgcttgctctgtttcttggccataaaaagcaaacggatcttcttctttcttagcacgcaattctcttaatcttcttaattgtgaatggacttgactcctgcaatctgctaataattcagcaatagtaccaaaaccttcgcctaagccaggatcaacgacttcttcaagcaattcctttctgttgtttttaatagcaatcatgcatgcagtatcaaatctataagctttacaatatagctgtatagcagcccgtatatccttcaaaaaatctaattgtaattttgccacatcaagatatttatgttcaaatgaaagtgaattgactaattcttcagcgacagattcaacatcatctttaaagtattcaattgcaattgtcatagcctcacgccacttcttggcaagaacatatgaatccatagctaatttatattcattcaacatttcataaacaataccagcttcactgtactgttgagttgaagataaatatttagcataatgagagtatattatgttttgttttggtagatcgtggcgatatagttgcaaacctttcttatacagattatgggtttccatgtattgaattaattcatcagacacttccgtagaatcattttcaagttgaactaaatgttccagtgctttttcaaaattcttcaaataatcatcaatagtgaatttacggcggagaggttcactatcttgtaaagattgcaaaaatggtaaatattcacgtgggtccatttgtgacctttgtgctactaacaatgctaatttaatatcgtatagggataaactcacttggtatactaaattaacatcttgtaggaaacacaaataggtaacttggttgtccttttcctttgtatcttctatagagcttattagttgtaaagcagaagttaaatcttgtggcttttgagaggcatatgcagtgataatggtttgcatatatttctttttataaccagggttggtcagtagtgtgtctaataaagctttacataccttgttgactttcgaggtagttggatcaaagaatttcttctttaaatattgttgcatctcggttagtggggcaggagcatactcgtatgaatctgttataccaaaatttagagtttctttatatttggtttgtgtaacatcatcttcaataagacatgacacaaataaattcaaatagtcaacatcagcaatttcatcaataaaatgctgtaggttatccataaacaagtcaggtgcataatcatatagtaaatctaaattaatacgatgtgtacgacactttaagaaggcttctctgtaattttttaataagatattcttacgaacttcagatagaaccataattcttggataaatagtttctaagttaccacggggagcttgtaatacaactgcagccttagatggcatagcagaaactaatatggatcctctttcaactgcacgaactctttcatcttcaacatctggttcaataataggaagagtcttgaatttggtggaattcaaatgcacaaattgtaagtaatgctgggcagtgacaaataataataaatcgtcagtaatttctatagatgtgacagcagatatcaaaagaacttgattggcgtataacttaccgcctgatgtaacaccaaatgccactaactccgaattatcatgttgccattgactatctacctcattagtagtgttatgaacccttttcactctaaaatcgcgtactaattcgggaaattgtgtgacctggtttacttggccttcagaatctagttgacaaattgtaccgtctctagtttgatatgctaaataattataatcaaaagttgattttaacaagataatcttatcaaagacttccacgacatttagaagagatggctgtgtgatatcgtgaacgtcaataagagcgatacgggaaagattttcagagtccaacaaaatacctactatattatcattaataaaggcgatttgacgaagagtatctaactctgtggcaaaaactgatttaggaaaatacttaattacttgtggatgcttcccctttttcatctcatcaatatgggaaattgatgctagtacaagatcattctttgtaatagctgcatatatctcattagacaaacttgttgaaacgtctataacattatctgagatactgaaatctctaaaataagcgggaggtggcacattagccatagatagtggagtaatgttaactatattcccatcaattactaaagaagtaccgtaatcaaacggttttaaagttggaccgtgcgtcattttaaatgttaaatcaacgatattaatatgatcttcgttagcgtacattaaagtgaattctttttcaggatgccatttagcgtattggatattaggcgaacatatttcttgctttaaataccaatggtagtttttggtagtccataattgaatagaatcggttaatacaatagttaaaatctctgaattactgttccaacataaactaacaatcttttcatccaagggtagtcttgaatcgaactcatagtgtcgtaacccgtttctttcaaagaatattatatctaaggaattttcttctcccttatcagtattacgttggacggaggcgatttgagaaccttgtggtttccaactcaataaatgttccataccatctacaggttcagaagcactatctaactgaccatccctagaaaacactcttaaaactcttctaggaacaatgttaccgggttcatctggcacttcagcgttctcaattgtagatgtgacaaaatattcgcaatcacctctccaagaaattgtcacttcgtgtgtatccatttcagttaacttacctgtatccaccatatatggcatagttgggtctcttaattcattaccaactaatccagatgctttcaaactagctaatgcttctctttccatggcacgagatcctttacctctaaattgggtctccttcttaccccatcccacagtgacatgtttggatttccttaaatcgtctatttctaattggtattcagcgattggttcaaatattttactcagtagaaccactttgcggtcttttataattaaagctaaagtctcttcatcaggagaccatttagctgcttcaatgccattatctatagtcccgacaatttccactacagtgtttaatgggtcaaaggttgttggatcatatgtagcagagatgatatcaccatgtttaaagacgaatattaattgattcaattcagcgaaatgaataaatgataacaattggtcatcgaatgtttcgatattaaatgaggctaaaatatttcttgtcccatctttcatatattgttggacttcaatcattcccacgtccaaggcacctaagacactagttatgctatcagttaaagtgtcgaagacgctatctaatagatgaaattcgactccgtcattggccaattcgtcattacttgtaacggttggttttaaacgacctttatttaaaactatgagattcttcatgcttcaaaaatgaaaaaaaaaaaatagttaatgtaattatattgataataatgatattaatgacaatatcgatgatgtcagtatatatatatataatgttatgatcctgttatgtccaaaatttctcactagactttgatgaaaagcgttcaagcgactctaataataagatattctaaaattagtaaggatgatagcttcaaatgaggaacagacatggaatagaagaaattctgtatatgagaacacagtttaacccatgctacatctattctataatataatgttactcttctcttccactcttattaataaattttccactaagaaaatattttggaaaaacaaaaaaaaaaaataaaacaaaatggaaatcattaataaaagaagaaaaaaagagaacatttcacggattctgacgggattatgcggaaaaaaataaaaggctgtcttttagaatctttttagaatattaattataagtatggctattattattattattattattattattattattattattattattactattattgtggaatctgaatgtttcacatctgttgcagataaacttttataaagtatgtatatacaacttatttacacactttatactgttgattgtaacaaattatgtattagatcggactttgcacgggggataagttttttctccagttgaataattctgtactcgtagtaaaagttggcaagtgatatcacattaggtattgtttctttattatatctatccgacaattctgaaaaatcaacattattatcatcaacatatttgatttgaaatccgttatcaaagatttctgcaactaaagttttcaattttctcaaagttaaattctgtgtcggtctggaatacaatttcaacatgggatgtttagtgaatttttgtagaacttcattctctaggatcggatctaccagcaaatattccaattttaaagttttatccaatttacataactcctgttggtgtgctaaaatgatttgtagtaataataaaactatatttggtggcagttcagataacattattgaatctatatcgtgcagttatataaggaaacaggtgtatttgtggatgtttgtgtgtgcatactctggtgtattctaatctagtcttgtctagtctgtgttttgctttggtgcagaatgaaaccgttacttttgctctctacctaagtatttatatataaatataaaaattgatatctcggcggctgcgaaatttcaactgtgaaagatgtgtagtgttgggtgtatggatgtgttttgagaacaagttaaaaagaaatttaagaaagtaaataaatattggtgcatagaggggaagaagtgtatgaatgttatgaagggatggtaaataaaaataggattgtacgaatgggtgttaggtcatagtacgttagattgggttggggacagttgtagtgatagaaatagtaatagtgatagataatatggataaatcaatcattaagggtttaaatgataaaatatatgagaagagaaaggcaactgctttagaattggaaaatttagtgaagaaatgtattttggataatgattatgagcgtattgataaaataatagatgaactgtgcagagattatgcatatgcattgcatcaacctatggctagaaatgctgggcttatgggcttagcagctacttctattgctttaggtagtactgaagtgggccaatatttaaggaagatcctacctcctgtattaacatgttttggtgatcaaaatgatcaagtgagattttatgcttgcgaaagtctctataacattgcaaagatttcaagaggtgaaatcctaccttatttcaatgaaatatttgatgtcctttgcaaaattactgcagataatgaaagttccgttaaaagtgctgctgaactacttaatagactcatcaaagatattgttgcagaaaaggcttccaattacagaacaatagttaataatgatccttcaaaaacaccagtagccacttctctggatcctctaacaggtaatgtttatcaggagaattatcaacaagataataacgatcttgcattttctttacctaaatttattccactgttaagtgaaagaatatatgcaattaatccagatacaagagtatttttagttgattggattcgggtactattaaatgcacctggattagaattgatgtcttatttaccgtcatttcttggtggacttttcactttcttaggtgattctcataacgatgttaaaattatcactaaagaactattggattctcttttacatgaagttaatagaatagctaaattgcaaatagagctaaagaataaacaaaagaaaaaactagagtcattaaaggataatttaacacaaaacgttgttcccaaaaaacaagatggctcacttattgcagaaaagaaaaaatcgctattacatgcatttaataatctttcttctgggaatagtaatgctaatactagtagtaataaattttctaacgctagtaatggtgatggtaattcccatattaataataatgaaactgacggtttacctgtaagcttagagcaagatcaaaatgataggttacaatcattaaggattgaaatggaaaccgctatccaagagaataatattctttccacggagaatcatgataagtttatagagactagaaacggtgacgaatatgttccaagtcaagacattcatttagattttactgacattctaagtattttaattaataatttggcatcttctgaggttgatattcaaatattggcgctccaatggttaaactcaattctaatgattgctccaggtgatttgattccattttacaccaaaatattgtccttacttttaaaattattatgtgacagagatcctgaagtctcaactattgcacgtacagtcaacgataaattgctaatattatgtgatagatatgatgaattacaacaaagatcttcacctatggtttatggacctatagttaatagtcttactttacaattttttgatagtaaagtagaagccaaaattgcctgtttagattggctgtcattgatataccaaaagtcacctgatgaaattttggcacacaatgacactatgttcttgactttgttgaattccttatctaataaagatagtcgattgattgaaaaagctttgagtttgttacagaaactgtgctcagaatcaaacgactcttatttgaggaaatttttggaagattttttaaatattttaagaagagattctgctcttttgaaaacgagagcaaattatattatgagaaaaatttgtaccagtttatctcctgagagaatatttaaagtaatatccttaattttaaatacatatgaagatactgtctttgttagaatgatgattcaaatattgagtacaaacctaataactgcacctgaaatgttctccttaagaaaaaaattaagaaacggtgatgatcctttatttttcactctattatttaaaacatggtgtatcaatccagtaagtgttataggtttggcgttgatagctgaaaattatgaactcgtttactctgtaattcaagaaatggctaactttgagctttcattgaatgatctagttcaattggatatcttagttcaattgtttgaatcatctgttttcacaagaatgagactacagcttttggagcagcaaaaatcacaatacctctataagtgtttatatgggatactaatgcttcttccgcaatctaaagccttcgatattttaaatagaaggttaaattccataaacttatggactttacaaccaagtaacaactcaacagtgttatatagacaaagaaatgtgtctggatcagtaagtgattctgataactcacaaaggtcagtgtcgcagaataagttaaaaaatcaagaattgttagatcatttcaatagagtcatgaatagagaacaagaagtagtagaattacgatctgttaaggactcagaacttcctggattaggttcttttatggatgtttcagaaaatcgtagtttccaatcaataaatccgttaatgtctaatgccaccaatgcaataacggaggtccatactttgaatcattcgtttgcagaacctgatgatacgagttctgtggtatttaggggaaagcttacaaccgatagttgaccttgggaattctagaacttgatataaatgctcttattggccaagtgatttacactgcaggtaatatgcagaaattgtgaatatatctactactcgtacgtcttataaatatataatttatgtatgtatgtattcatgttcatagttaataaagctactgaagtaattcatctctataatgaggttggaaattgatccgttttgatgtcttacgtagatagtcagcacgggctctttgttccaatagttgcatttttttcaatccactcttgtattgtttctctgtgataccactaaccattcttctatcttgagctgtaacactcactgttcttactggtcgacgagttgtgattgacgatatattttgattatttgaggataagggtctttcaaaatctgattgagaataattatcagtagtattgttgtcttgttcctcttcacctacttcgaaatgaattcttttggttgatttaacttttataatgggcttttctgttagcgaagagtaatcatagaaaggagcaaacatatctttctcgaaactcgtttcatagggcattttacaatgacgtttagaattcatatgatctctaatacttttcaaacttttcccaacataattacaacataaacacgcataatcaacaacaatagtgttgattagaaaatctaataacccaggtaaatccactaaataggaacgttctggtatatataacccatgagaatgaaacatatgtctgatgtttttttccacttctttgttatcaataccacaataaaggcagcatgtgtgatttaagctattatcgatgttttcaccattttgagatttattatcatcagtttcatcctcctctgttgaatagtcactaccaaagttcgattcactggtaaagctatattcagagattgtttcctcatctagatctgtattattatattcggtatcaaaagttaattgagaaaattcagaactaatggattctgtttcagatactatacgcttcaaatctaactcatcttgtttataatcttggggtattttgatattagaactcgatatatctggttcttcctcattatcataagaggcatgacgtttattatcatggttatggtggtggtagtgtttttttttgaagtatttagaatggtcatttgaattattcaacatagcaaaaccaaactcatcaactggattggcttcctgttcttgtttagacatttgcaatttttcagcaaattcatctgaagtgataggtggtaggtgagctactcttcttttcaaattgtacctatgccattctgtcttcatatgatatctctgtaaatcacttgttttaaactcggttctacatgagttgcaggtaaatattgaactattcatttttatactcaaatgaatatctctttgtttgtttatttaagtaaattaaaaggtattatttcacaatttgtgtatgtctccttttacttttgctaaggagagtggagaaagaacatggattaacttcatgttaatgtgtctgtttaatatttattcctttatttttaacctttatacactgttttcatttattatttcacacacacttctgcagctaggaaggtagaatatcagctatcataattctgtattgatccctccagttgccacaataactttctgccttctagagtaatatttccccttttgaaaaatgagaggaagtctctttaagtgaggatttatttttatatataatgaaactcatgtagaggtgtatgtttttgtaaagtcatcagtatagtgaaataggatttgttcacatcatcagtgtaaattaaaaaagactacaaaatatgtatcagctgttgagatgcttatctgtaactaaatagtgtaacaatgattctgatttaaactttagtgcatgattcacctattttttgttatataagacgattagcaaataaaactataatacaaactttcggaggaggagactcatagtcaatctatatctatcttttacataattggttctaaaattcgccagtccaaggtaacgatggcattggccacatacgtctgtaaagagacattgccacaacatcttgagcagacaatttagcatcgaatcttgctttgaagtagccgtgtgtacccaacttctccttgataaatcctgatcttccactcttggtaaataatggaatggatttaaaccattccacatcttctgggttgaagaacatgtaacgaacagtaacaacgtttctatgaaatctaaatggatgaccagtaaggatggctctctttgccataattctagtgtggtctgcatttaagaatgtaccatggcctattagttcaataccggtcctttctgtagacgatggtttaaagaagatagctggagattgggtaaaatcgacaggagcaatacaagtggcgatagattgggtatcggtatgtaagaatctttcaaatttatgaacattgtttggactatttgtgtcggcagaaaacaaaggtttgattgtgtatcttctaataccatactgtactattattggttcttgtgctggaactggcttattatattcttcccatctttgtaatgaaaagttcacaacactgtttttatgttcatgtggtaataaactataaatggctacagcataagcttgtggtgataatatttttgttaacaggttttttggtaaacttaggtatatttttacatgatccccagaaatcacttgtgcatcttctaaagcatcttttaacaatctgtttctaatatttttataattactaattcttagcaaacgtttccacacaccaggacgttctgggtccctttcatcaacatcccaaatacagttatgtaaatttttcaaacctctatatcttttcaatctttcaataccagactcagctggatttaattcaatttcatcaggaaattcacgatcttccttttctaaagctctatattcttgtaattgacgttcttcttcctctggtgaaagatcaataaatacttcttcctcttctgcttcttcatttccttcttctaagttttgttgttggtcataattactttcaaatgtcatattatctgtatccatgatcatgtcatctttatcattttgctctatttcatcttcatattgttcagcggcttcttcgtctggattgatgacatcttctaagtaccattttgcctgatacgacgaagtaccttttggaaccttgactctttcctcattttcatcacttctcggcaaatatccaccatcatcgaatctggcagaagttaatttttcatattcataatcttcttcatcggagaactcttcgaaatcaacatcctctggtgcatattcatctaatgtttctctattttcattagattcaaaatggttagtttcctccaaatctataagaatatcatcaattttattgccattcttctgagttttcttatttgtcttaattgatgcttttaatctttcaatcttagatatttgaaaatcacccaggtttggaatatggacaagtctattggtgttgaagccaacaccacgaacagtacctctaatcattaattcacaatattggtcatttacttcattgtaatcgatttcatctgcaaccatgtaacctcttgaatctctccagttgactggacgtggtaatttttgacataaagttcttaaaacgattaaagaatctgagggtttctctaaattataaattctgtcctcattagggaagaaatgtttgaaataactttctaaagattgtttaatatctaattggaatttttcctttggatgaacttcagataaattggatacgacaccaatatatgacgatataccttgtaattctaatgcacgtataagttgttcaccaacgtcttgttctacctcagaaacaccacttaattggaatactacataatctgaaactttggcagcatctaaaatgtccataaaattatttaaatctggaattataattttcaaattactcttatattgtttgacataataattcttaacacaaggttccccaatatttgtattttcaataccactagtttgttggacgtcagcggatgacaatattttgtcaattgcatcttgtggattgcaatcatcagtcaagggaacaacagtaataattttttcagcaccattgacaccctcaaacagttttctattttctagagacgcaaggatcttctgtgccctaatttgtttcgccttgttacgtctttgtaatttagattccccctttaatggtttattattggaaatttctcgttcaaccttacccttatgtaatctctttaaagcacccttggaagcgtgttttgacttaaaggacttatgtgcctttttgaaagatgatctgtggtggtgaccagccattttttggttattatttaattggatctgatacaagagaataaataaataatgagttggctagtctttgacaattttaatgaaaatcaatgcacaaagagagagactttttattttcaaattgctgactctgtttgtcaatgtgtttttcaaagtatgatctcatctcatctcaaatctttaaaaaaaattttgaacaaatttccttgaagactttctctgtctgtttaattttttttattttttaattttgtttttgtaaaatcaaaatatttgtttgtgttattatttatttgacggtccaaacatccatacatctaaatataacgatttaatttttttttaaaaaaagacagtttttatattattcgatgaatttcctaaaatagattacaaagaacattctaatctgcggcatgggttttcattttttgctgtttgtttatttcgtcacaagaagaaggagtggtggcttttacaaaatggtaagaagaagaggtttggttactgaaggggcaaaaggaacagcttggaagatccagtagcaagtaatacgcgtgatgttgccattaccattttttcctcctgcctgtttttcgcccacccataatctttgtttccctctacaacagttgcctgcttaactgcacttgtgagactaggaagaaccatcctgttcaaacttttgtaggttggagctagtaagcccttcttccaacaacttctgttgcactgaatatgtatttggtaatggtaatagctactgtgtttcctttagtgagacacgtacttgctattctcttctcttccataagacaaacagattacctatccatgaagtgagagaatagccctactaacaactgcttggcttctagacaaaggctagagcgagtacagtctatctattatcgtgtattgggatgatgatagtattcctggtgtcttcaataaaaatacggtctaagagaagccttaaaatgaacggtatcttgtacccttatagtgggaagtttcttgttgttagatatataattttagagcagctaaagtaaaccaaatacagagactataatataatgtatgtaccaaagttaaaacaaaccagggaatttttagtggcattactcgttcattgaattcaattggacaaagaaataaatggttagaattattaggatttgaataattaaataaataaggaggaagtgttgtagatattccattaggcatagactttatatatttggatagttttttttgtattttccagttgattttgtaatagagaatatacgtgtgaatagaaaaatatggaggtatagtctgcctgtttcaaaaataataagccaaattgttataaacaggatttcttttggaattaatggagtgatattacatgcggtattggtaatgttacaagatcagtaaaatgtcagtttgtgtgtttgatgacattcctatgggactctatgatcaagttgaatacagagtactaacaactaattgtttgagtgtaatattgagaatactgatataatattttgatatcattatgttatgggtttttctgttattattacttgtatgatttattttattttttatacagcaaaatggctcacgaaaacgtctggttctctcacccaagaagatacggtaaaggttctcgtcaatgtcgtgtctgtgcttctcactctggtttaatcagaaagtacgacttgaacatctgtcgtcaatgtttcagagaaaaggctagtgacatcggtttccacaagtaccgttaaaaagttagtttgaatattacatttgttttatattctagcttttttacatactttgttttaaatagaaatctgtgtataattatacatatcctgtttaatcggtccatttaattagtattatattatattaaactgtgttgtgtttctagtttaggagattgtgtatatatttgtagcattttattgtggtgtaggcattgtcttttaatttctcatatgatatgttatactataaccgcttcctgtgagatcaagtctgtaagtttagatgttattcctctctaagtaaacctaacttaatttctaggaaattttacccggaatttggattaattgttctttgttttgttttctgttttttgtttttttagtttggatcgagtgaatttcaaatgtttcagtatataaaggtagaaaatttcatcttacagaaacacatatgacgttgcagctttcatttttcatatacatttgttcattcactaaaaaagaaaccgaatcaaaataatactggaaacaatgccacaattggctattctgtcatcaaacagctgctaattgccagtccttcaaaataattgaagtacatgtttcccagatcaactatggtcaaataggaagtccaatgtccgtgtacttattatggtatagcaatacatatacatattatgataagagatggatatgggatgtcgattatacaccacatcttttttaaatggtattttttactttgtctaattagtagtatattacatatgttaaataagatacttttaaagtcatttcggtatttttttatatgtacaaaaagaatttctttagataaattgtatttatacatacaaatacactttcttatagtttacacagagtcttgtccctcgtagagacggaaatttttaaccggttgacggattggtgcagtgcataatccagatttaaattcgccaatgttttcaattaatttaccagaaggatatctagaggtgtttaattcaccttcgtcgatgtcctttgcttgtatctgagattgtaaatgaacaactattttggcagcatctggtccgataatataggtgttgaagaattcgatcatttcttctttagtcaacttggctactaatgcagcttttctttgacgatgagtaaagttgtaatcacccaaatatatagcagctgcataacgtgaactttcttcattcatatttttgtatttctgtaaaagacttttacatagagcatctttatgtttattaaaatcagtttcactcattgctttcaaggttttgccaaattgttggtagaagttgtcaattctccattccagatatggggttgtatgttctgattgaactaagatacgaatgttggaagtaccatggttatttagacttgaactgaaaactacataacctaactgctcttttgttctcaatgtatcaaaacatggttcatgaagcatttgtgcaaataacccactctttgcagataactcttcagtgtaaacatcaacctgaacaacatgttgaatacaagaattaacatttttcttgtcttttagtaaagtttcatacctgaatgttgatcccttaggtattagatatgatcttaatcttctgttttgaccttgtgtatctaaggactgttttcccttgaatatcgatgtagcaatgttttcaacatctttaacttcattatatttgaagttaccatgcaccaaaatttcagagtatacttcttcaaacatatttggaatgaatttagttaattgctcaaaagtcaaatttttaactacatttagtttgtcttcaatagtccatgacttttcattgattattgcattataaaatggggatatttgagaatacggaacttcatacatcagattttgaagattctgtatcgttttgtctttgaaaatatcaaagcggatttcctttggtgtgaaatgtttaataccatataagaattcttgtaatattacgtataatttatcattgaacccataaattgttaaatctaaaccttgattagtttttgaaaatgagacatgcgaattggcacaagatgcatcatattgtaaatcttttaatgaatcattgaccaattggacatataaagtggcaagcatactattcaaaaggcatgactgtgtgttaggtaattttaaagatatgtagatgtaacctcttggttgccaaaatctatcatcctttttgtaccagattttgccaaaattgttatctttgactaataagggttcttctagaggttcttttggtaatgctggatctttattcttatcaacctcaaagtttgtagctatgaattcattttgacgtggtaatttcaaattgtcatttaatccaacatttttgatttttttcactaatgcatcagggtaatcaacgattttgtaatctgtgccataccatttttctttagaatcagtctcaagatcctttgatattaaggtaattctggagttttccaaagtcatggaattaacataattgacaactagatcaggttcattttcaattaataaattggtacttaagattctattcactgggatatattccttctctaaagctttagccaaagttgatactgtattagaagggtttcccttttgtttaaatttgaaacaggcatttgagatttcttgtaattcgttaaatacccaatcctttggtaattcttcttttaacatttcaatgtactggaaaacattatatatcaccttagtatagttctccaatccagccttagttagatcaatatcaattgaaaaaaacgcattatctttagatacagtgtgtccaccagcagataattcgttagcatagcccaattctttcaaatgtgccaataaggaaccagaaccctcatggccaattaaatgagataagatatgaggtggttgtgatttccaatgttggtcgcaatcaggcactacaaatgtaatctctaatttccttaattctttaacaggcttaacctgaataatcttttgaagataggagggttttagtattggttcattgtattctggcaaatcacggtcagtggtcttgacgtctttaaataatgtataagcccaattagataaagtatctaaatcttctctacctaagatacaaagtttcattaagtttgcagaatatgacttgttataaaattttaataattcgtctctaatgtttaatcctagatttttggggttatcgcctaaagtgactaaattacctgtagagaatttgtgataaggatgtttgatgttagtcaaagatttatctaattgatataatctccataaatcattttgcaagtttttcttattctctgagtcaacagcgttaatttctttatcggttgaattcttattgaataagggaccagtaaaaaatccagagaatctatccaaagcaccatgtagatgttgatgattgatttcaaagtaataattggtattttgggcaccagtatatgcatttgaagaacctccatgtttacttaaataactggaatattcattttcatcagggaattttttagaacccataaataataaatgttcacagaaatgagccagaccaggcagattttctggatcttcgaatgcaccaatgtgaacatctaaggcggcggcagctttatctgtggtcgaatcatgtattagtaatgcttttaagttatttggcaattgaatgtatctatatgatctgtcatcgagatcaggttttaagaaatcagattcgagaattttataattggacatttttttaactgtagaatatgtaggtgagttatatttaaaggacgatcgtatagtgttaatcaaacaaaaactcataaaggataggaatacaattaaactatacaatgtggtgagaaaaaataataaataaagaggggaaagggaggaaacaaaaagaaaaagaagaaaaagaagaagaagatgctgtaagaaatgggataaaccaacaattcttaatctatttatcttaagtatatattgatcaattgaatattatatgatatccaagaatgtaggatatgtatatattatgcttgagacttgttttggaattaaaaggtattttttcctttgatgcttagtaaaccaactttcaacaagccttttgttttttgattttttttttctccattttttattttccgttatttcaccaatctttcgggttttttgacattcgagcagtcgagacagttcaattaatctgttccatgaacatgcatagacttacgcatatatatatttatatatatatttaagagattttaagaatgcagaaatatgctaataagtgatttcataggtattattgttgataatgcaagtagaatgggggaataaactaggataagcatgcgtagagttacaggacacaacgctataacggttgggatagttagtgtaattagtgtatacatgggtgtaaatttctttcaaccaatagttgttgaaaggttacgaaaggatggtaatctaagacaagatattgagttaccacacttcaatccagacggaactgttaaagtgatggacgattccattaaatctataccattgaaacaaacgaaggataataccaatcaacacgataaatagaaaccacagttgagtatgttgtgttttattgggaataccagcataaactaccagtcactaagataaatatataatatattgcatccatgtgtctaatttttactgtaagtattagccctaacagcacattgagcatatatttgtttgtatatgtggatatatgtatgtagacacatatgtggattgtataagtcttcaatctagaaaaattcttttgtatggaatgcagttttccaaaaccttatttgttttgttttgttttttgtctttttgtttttttgcaagccctaacattgtgtgtccccttttttttttttctttttgaacagtcttttggaagtttttgcttcctaatcgagtaagaactgcgctgctattaatagcaattggatcacatgacctcaagaagtcgaaaaaggaaaatcactgaaaacaaaaacaaaaacagttgtcttgttttgttatatttctttttttttttttttttttgtttttgtttttgtttgccctcgaggaaaaagaaaatgaaaacagacactttttatttatttaaaaagaaagtaaacaacaaacttctttttttgtgtgtgattctttgaaagacgacctgtattttcgacattattactagaactttttgtcagactagcttgttcataagggattgtatatacattatatttgtcttctattttttttttctttcctagtaaagaacatacttgacatttgacattttgttgtctttctgaatccactcgctagctaattcgtttactacaaaagacagacccaaaaaggtcgatttatagtgaatatataataacaacaacaggatatctacacaccatgctttcttccactgttttttccgctgttttatctttagcccttttatccaatgaggttttggccacaccaccagcttgtttattagcttgtgtagctcaagttactaaatcatcatctagttgcaatgctttaaatgacgtcacttgtatatgctccaatgaaggtgcttccatcaagagttgtttggactctatttgtccaaacggtaatgccgatgccgcttattctgcatttaaatcttcatgtgctgctcaaaacgcttccattaatcaagctagttcatcatcctctgtttcttccacttctaccagctcttccatttcctcttcctcttcttcttctactactactactagctcttcatccgtggttcattcttcttctactgctgttgaaacaacctcctctaaagtaactacttcttccacttccacttcaacctctatttcttccacttctaccactgtcgtttcttctactctctcttcctcttcttcttctacacaaaggtttactgtttccgaaattcattctggtgctggtaacttcttacaagcaggtaactctttcgttgttgcagcagttgccgctttattaatctgattttatttcgtcttctaaattttttatttttgatatatttttattttttatttcaaacttattcttcatgtgacgtttttaatattttggttttctttcttgactctttttattcagattttttatatctgcttataaataattaacatatatatgttctcatataatcatagttatttatatttatatatttaagtaggatttttatttacattatttaggttttcaataaaaaaattaatggattgttaatattaaggctattcatatactcttttatagttttttgctgattcactgttgatttttaagatttaatgtttatgctaagaagtagatctttaactaattatagtacaacatactaaatatataaaaaataaaaaataaaaataaaaattaaaaataaaaattaaaaataaaaattaaaaatataaaagatacccaaaatttatagaatcattattattaatgtatataactattttatccagatacatctttttttgcattttcattaccattatcgagtttatttggggcattcccacatatcaccagattatctggaaattcgttatacactggtggttcaatatatctaggcaagaaatctacttcatgtctgttcagcgatgctgtaccaaaattagcaccacttctaatactactccttgtttgacaatatatttgaacaggatttatcctaacttctgtttgtttaattgtccccttgatactccaatcaatcaacaattccaagtagaaagttcgtcgtattgtacatgtcttaaaactataaagtctattaccacgatgcttataatcttcttcgttaaataataatctacgcaattgtgggtgttcccttagtttaatttcacaatctgatttaccgatatatttattctcatcaattgtacctagtttatttgaactgattcttggttttaagtctttaatattaaaaatacctgatatcaaaggttcttctaaatttgagtctaccaatcttaatgatgaaatattttcatttgctacccccttggataaataagtcgcattttcaatcaagtttaattgaacacgaattggtttgattaatagttttttaataattgacaaattccctttgcaggtcaaaaaaatatgatcaaatctattactgtttcttctaaatagaggatcatttctaaatatttgtttaaacccatcatttttactgcgaacctctacccacattgaattctctatggatgtactaatattatttatttcttgttcatcttgaaataaattcaatttatatgttgattgataaagtttatatttcttactgtttatattcaccatctcaccagtattaatagtggtattgcttctatttatattatgtgaagtagtagatctatcaacattagtaaattgtttatttaatgacgacccagaagtgtctgtattattggaaaagtttaaaacgttactctcaagtgatgatgaattccctattgcatagctggctttagaaattggattttgattgttattattattaccactattactatcattattccccttttcagtgtcattatctggatatgtaatatctcttattgtcggaatatactcaatagattttgtttcccttaatattttatcgaatggtttaaaccatattttaggtttacccatttcaatattcacttccacaaaataaaatattttaccaaatgaataaaaaaataaatctaaattatcaattttaattagttctttccattttagattgaatgaaggtggtaatctaatgtctctctttttcaaaaaacatatcatatctcttgtatgatgtttcaagcacctaggtctcaaacctcttaatgtcggaaacgaaaattcataaacatactctcctggatgtatcttgaacggttttaatgaaccttctaaagcatcccagacattatctggggggaacattctcttctctaaatccaataatctatggtacgatttattatcttgtacaggtgttaacattccattttgggatatcatgtaatctgtattaaatttagtttgagtttctgttataccctttaaatggaccgaaatttttttaataggcagtgctctagtcaatttaagtttcaatgttcctgatatattttcattcccactataaaattcaccattttctggaggtatcagatataattcgatatctgttgaatttcccattctttaatcctttcaaaacagtaaaagtatagcagatcgggtttttcttgtaatattgtactatgggatagacacaatataatctatcctaaatattgttggtatatttgtatgtcaaaaacaataaggaaaaagagaaatgacttaactctgtgtctttaataaaagttttatcattcatttttcactttgataatcttatctgaaatcatacatgccatatcgtgatgcttctccaaaactaattggataactaatatattgaaagatgtagctttaaccaaaatctttaacctccatttcccttccttaatttttttattttttttttttttaaattctttaaggtaacagattccccacattctgaagcacatctaaaacaaccatcaagaaattgattacatattttgatgaaatgtaaataatctctctttcacaattacatattgcaaaaatgataattaccacataccaataataataacaacgataacaatcgaaagactacattatgaataatctctatttaaaaaggacatttttccattcatccaagaccttgttttttgataaatttttaaaacctgttatagaggcttcacaaaagagagagcatatggtagaacaattgattagaccagtaggtctgcctcagccaccaaattcaaaaatacagtattccaaaggcaattcatttagagatttattcgatgaaaaaaagacacgaagaagaaccaaagaactaacattagaaatgagtaaatcagggatgtatgatgtatatacttttagaaagacaaatggcaaacttttcatctctccaaaatcctattggcgtgatgataaatccttgtatttcccacatatagtagggagatctttgaaaaaaggagaatctaaacaaatatcaatcgaagataaaatgagaggcaaattgaatattgtacggctgtttagtaatgatataggtgaaaagttatcatctcaattttttaaagaaccttatacccttgaatcgttgtcaaatactccccttgctaaaaataatacacaattaattgaaattacttgggtcgaaaacggcataaaatctttgattacaaaattatctgtctctaagttgcgatccaatatgtctgaacgacgtcagagaaattatttcttcgcttataaggatcaattaccatttattattagagatcaattaaatattaataacatcttgacaggatatatactattggtcgaccaaaatttaaagattcgctggatggcctgcggtggtgtatcgaatctccacactgaagagagagatacaatgtggaaatgtatcagatcattacaaaaggagatgaaaaagatcaatgacagtagccagaacaaaaattgaaatagaaaatcatataaaggtttcaattaaaatttacactacaatcttatagcacacatttattaaactactaaaatatttcatagatttcttcattattataccatcataagatgccatacaagattttcacatccaggttatgtggaaaacgtttatgttcttctttaaaatctcctgtgctacttgttttcaaatttatagcatccggacatcgttctttggcccttttctatcttctgtttttattttattttatttttttttttttttaatttttgatctgacaattctttgggcggctaattatgattaaaccttgtacctacaatttaactgataagtacaatattgcacccacatgcaaaaccagatatatattcagtaattatcctttaactaaccactaatttatgtatttgtaagtagaaaaaacctgtaaatacaacaagaagtaaattgataactgtttccaaattgtattgtcgatactattaaaagcttcaaggatctagcttaaacgtaaaaaggtaaaaatataatgtcagatgcattattcgataaaaattttgttttctgttcaatatgtcatcaaagagctgctacaggtaacccattaattttgacttcatgtgcgcacattttatgtgacaaacatttatctatggacaatatatgtccaatttgtaaaacaaatgatatctcgactgtcagattggtggagcaacagacattacctaacgatgttaaattattttttcagcctttacccaccctaatagagaatatatataatatctcaatatttcaaatcaatggtttaaatgaacagatccactattatcaatctcattgtatcaaactgagagaaaaagttgcaagacagcaacaattactgtatcaagctaaaaatgaacttgataagataccattattaaaacaaaaaattcaatacttagaagactcaatacagtctataactagaaacgtttctaccacgaataaaaataagactccagttacaaaagatcatttaaaaggatccaaacataaggtgtcttcgttttttaatagaaaaactaataccagttttggcttaaatagtacagattcttatgtacaaactcagccaccaccaactgtcgatttaactatagacaatgatgattacaacgatcaacaacaacaacaaaaacaacagcagcagcagaattttgtttctaaacttagaaggtctcaagcactacgacacaatactcaaaaatcacttcaatataaagatttctcaaaggaaaaggatcagaataatagagatctatacagcaagaataagagaagtactaatgtaagagccaatactattagcctaagttcatataagaacggacagataaataataagagaaaccttagaataaatgatagcatagctaataccaacggccatacagatggtcttaaattatatgatgatttgatagcagcagaatctacacaaattaataaatttaattcaagctctgaatatattttacaacccacacagaatactttttctccagaacgaatacaatttaaaactggtatacaatcacctaggtcaaataataataataataatgaaaagtatggccatcattatactgaaaacaataaacaatatcgtgagaatgatatccctatgttgaagtgcaaaaaagcaaacttgattacaccccctgaaaaaaatttgtcttcaaatactacaaataataattcacaaatctataatgataaaactcaaaggaaaagaatgaataccacattggtatcaggacgaatacattttcctacacctttagaaaaattaaaaattggtaaaaggaaaccaataactaataattcgccaacaatggcccaatatttaaagcgaagaagtgccacatctcaaattatcctaccgagcaattttgctaataataaaaacacaataaacaatggtagtattggtaacaaacaactctatagagggcaaacatccactaataattataagtaataaaaagaaaataaaacagaagaagtggaataatccataaccaccataaaaaggagagatacaatgttactaaattatgtgttagtttgatatatatatatatatatatatatatatgtatgtatgtatgtatttatataaatagaaagaaagatatacttagggaggtaaatagagatatattataaaataaaaagaaaaaaaatattgttgtacataaaaagaatatgttctaaacctgatatcagtaaattaaaaaaaacaaaacaaaaactaattaattaatcatcaacttattttccacttgtttatatgttaccactcttctttaattgaacataacaggagataaatgggacagcaaagccaagagcaaaaaaaccgaagtgcacaacaccgtacgggatctttctgtcatgtactttgaatggtatattagagtagacaccttctttgaaatgtgctgcgcttctagcaatagaagaaaaagttctcctcgtagaaagtctaactaattgttgggtcaacataattcttgatattacaaatgtatgcttcttttttgtatatgggtgcttgtctataaattcaatctttttggaacagaaaaaagtggtgatatactatttccgaacgattagaagtagggtccgttatctacgaaactctgaaatgccttatataagaagaagaaaaaaattgcaaggaatcgttatgacagaaggaatagaaggaaccagtatgaaagagccagatcaccaagaaagggtctagaagttgaatggagagtaaacatttattaatggatgaatacctccaatcgatgaatgaaaacaaaacgtgtataaaaacgcagctgaaagcacaggacaagaccttctgagcgttcgatcaatcagactctaatcttccttttctctcccttctcctgcgtctgttcgagcgattgagcgtcacatttacaatcccccgatatctttttttggcatatttatattctcttaacgtttccatctgtttgcttcttaatttttttcccttcttttgatgggccaaataaacaaaaacagagaaattccatgacttgcttttttttttttttttttttttacttgcgaaaactccgtaaaggagaatattattggtcgaaacgaattttacacagtaccctagagttcaagaaagaatcgtgtacattgttcttatgtctttctatatatgtacagacacatgcatactaacttaaagaagttaattgatcactctgatactagcatacgcccatcatcctgttgagcttaagactgctttacaagtgcctactgtgaggtagtggaaagtacttttattttatatatatatatatatatgtaccaagaaatgcatacatacaataatttatgtagtaacgcacacagcctattcggtatagtggacatacgatgcagctaatttctttcatggtaatagtctaaagattccatcggcaataatgatgaatcttttatggattccctttaaacgtagactttcttgtaaatgtttaattatggcaacttctcctaatgtaataccaccaagaaatattattattgatacatcacgatgctggtagttcttcttgttactgctactgttactgttactacttttaattcgggattttttggatggtttcggaaccagtgctaattcttgaacaaccattttattaccatatattttctcaaacagttctttagtagctattaggctaggctcccttgataatataaaaggctgttgagatgaataactcttggataaaaatgtacgttcatacaacaattgtaagatccttattgttatggggacaactccacaaaacgcaaatgataaacttgtgggacttgatgcctccttttctgcattactattttcattttcgtctattggtaatgtctctaaccatttagctatacttctatagttccttttcaaaagaagttcgtttccactcgatttcttggctaaatatttcatcttttgtaatctttgtaatataaataaagtgtcaatcccaaatcgatctatcaaatcggttttcaatgattcaaaatcagaatccttaatcccacttttacacagagcaatcaatgatactaattttagtattctatctctaggaacctcattctcataaattaaatccatcaattttaaataaagttcgctcgaatgaacataatctgataagatatcttgttctaactccaagatcctagagaattgtaactcagggtttgtttctacttgctcaagaacgtcgcttgatagaagtgtatgcattttcaaaagtctctgattctcctgtaaggttgacaaggactctacaaaatttttgatttcacccacagtctctgcagtgtgtcttgaatcatacttgatttgaagctctttagccattttatttaaagtaggtccaattgtgccaaaattacaatattttatctcttgccaaatatcatcatttacataattcagttttatatctttcttagtctctaatgacgataaagactggtcaaatttgaagaaatcgtcaattattcctatatatgacaactgggtcaataatggggttattggatccacatcacgctctataactatcaaatctgtctccaagtttatatcatatttattttcgtataaagtagacttaataaataaatcattttgatcctcctctctagccattctattctttaactggttgagtaaaatggtcgattcatctcctatactgacagctgtggttattgtcgtattagtggtctttaataaagatagcacacagtttatcatattgtttcttaaaatagatcgtgtgcattgtttcatggaagatctattaggatgatataaactatcattatcatcattaagcaatacatttgctaataataaatcatcatctatacgaggaataggtaacgtaaaccatggatatagtttacttcttggtatctgtgatttgataaagtgaggtagctcttctaaatggtttgtatcttgagtctcccaggtactataaatgatattcaatttatttatcgtaaactttgactgaattttagtgaatattgatgggactattaaatttactttaacatctatcaaaaacactaactccataccgggatcattgttcataatagtctgtaaatcatcaataacttggttttcatcgagtataacaatttttcgaacaggagtccggtccttcaattgggtaaatgataatatttcatttaatagaggcaaaagtgttaactgaataactagaatttgatctgctgcactaatattcgataaaatatctgttaatcttgtagatataatattgctaaactgtcttgtattccaatttttatccattgctagtgtggagtccttaagtgttgtgtaacgtatgatttcttcgtttaagagatcttatggcattttcgcaaaatgaccaatatgatgcggatccaagatattttatacacttttagatgttactcataatatcccagcatttcaaggtgtcttattcttctttttttcttttttccttttagctgtcttccaaactttaagaaaacgtattgcttaccaactcaacaagcatagcaacaagagttttaacataacttttagtgcttataaatgaatggaaaaattcaaaaaaaatcagatgaattgttaagatttatatattaagaatcaattcagtgaattcatattagattgtatcaaaagtacattaatatttgaaaaaaacactgtacataatatacagatactattgatagttatgcaaggtcttattttacatatatatattaatttgaaataaattatgtgttcacattaagtaatatatgaaaattatgccttcataccacttcttgatgcaaattctctataataatcaagcatctctggagtaataccctttgatattccttctaaggcattttcaaaatgtttgggttccacatttgtggcctcaagattttccatgatggcagccaacccggcttcttggcataacaatacgacttccgcacctgaacaaccatccgtacgtttagctagatcttcgagatcaataccagtttgttcaatattaaatttcttggtacaattctttagtatctgaagtctcgcctcaaaatcaggaggagccacataaatatgtctatctagccttccaggtcttaataaagcaggatcaatctcatcaggtctattggttgctgccactattactacaccgtttaattcttcaacaccatcaatttcgtttaataaagtagtcaagacatgattagctgcggaggtagatccaccactgtctctatctggtgataaagcatcaatttcatcaaaaaagataatacttggagaggctgcacgtgcttttctaaatatctccctaattgccttctctgattcaccaacatatttattaaatatttcaggacctttaacagcaaggaagttaacacctgactcagtggctaatgcctttgcagttaaggttttagagcaacctggtggcccatataaaagaacaccttttggtgcagaaattcctagtttagcaaaagtctctgatgcttctaaaggcaactgaatcatttccctcattttcctctttaaatcttcctgtccaccaatatcagaccaataaactttaggcatttcaagaaagatctctctcattgcactaggtctgacttctaatagagcattctcaacatcacttattattacttttagggtagtttcagacaaattgataccttctttaattccacgttggattgttttcatcacagattctctacatagtgcagataaatctgctcctacataaccatgtgtctttgaagcaatcaacttgatatcttcgttggtcaaagtatgccgttctatagacattttactaaactgtttcaataaaatgtccaatctggcattaacatcaggaatcccaatttcgatttcttgatcaaatctcccaggtcttcttaatgctggatccacagaattaggtctatttgttgctgctatcactacaacccttccagaggcactcataccatccattaatgttaataaagttgccacaattctgctctcaacttcgccagaatcatcattggatctatttggtgctagggaatctacttcatcaataaatatcatggacggttggtatctttgtgcttcattaaaaatatcccttaaagcagcttctgtctcaccaagatattttgaaacaatggatggtccactaattgtcaatatatgggcatcaatcgagttggctacacacctcaataacattgtcttacctgttccaggtggaccgtgcaacaagataccacgaggtggagtaataccaaagtcactgaacagagtaggttgattcaatggtaatttgatagtattttgtaatatctcaatttctttgtttagaccaccaacgtttttataattgtgatgttctggtaaattatatttagaactaactgttgtagaagagaccaaaacaacctttgtagaaccctttttatacaaaacaggtggtgacaaataaaatgtatctaattcttcattattctgcaaagtcatctttgatatatctggtgacctgttgtctacaacatcagtaattaacaggtccactttttttgctgcttcacaagagtcatttatgtcgaaatccttaaaaagcattccaggcatgataatcccacattcatccaaaagcttttcaacccttttaagatcaacatcttgttcaactaaagagccttgtatagatccaacagtaatagtaaatgcataagttggttgagaagccaatttttttatttcaatacgatcacctaataatatatttccaacagcccttattggtgcagatagtaatattacattagaagggtgactttcatcatcagctggtttgacttgaacagcaattccattacacccaaatttattgattaagcagatagaaccaggtgagatatctagattttttaaaatagaaggatttattatagcacaacatgtaagtttattatcacctttgctattcaaaggacgaacaatatactctgttggaagtttaatctttggttgtttgattgtagaatcattcttcgaactggagtttagtgactttttagatgtacttgatttgggagccattaaatttggtaaaaatcctcagagaaaaacctcacctgaatctttatatcttttactttaatacaaatagataaaatttatttgtaggttaatcttttcgcatattatcgcatatttattcataataaacgattctgattatatattttacaagtaactgatactaatgtcgaatttttgatggtcatcgataaaattttcaatatttccattaaaggatatttccaataagttgttacctgaaaataatccatagtgagtttttgaatgcatattgatacaatctattctttttaaggatatacatatacatatatataaataccataataactatagatagatgtattttggatgtataacaacgttaaagcgattttctccttcttcaccttaacaaagcagtactttcatatacatacctctttaacaaaatagtacaagtacagtcaaaacgatattatcataatattaacagtaacaatagtgttaaagactaaattatattaataaccattatctataaatacaaactagcagcaaaaactatgtctctcttaatcaattcttgagctttactcatcttcatatgaagtgttgaattacctataatgatggatgcagtctttacttcacgacatatttcatctaaccatgtaataactcttacaacagtaccttctgcctctggactaatttccataatttctttaaatgaaagaccacgtgcccattcataaacaacattcattaacgcaaatctcttcttttctaagaattctgcctcttcttgtgttaatggaacttgatatgtttcataaactgataacatcttttgatagatttcaactatacgttttttaccctttactaatcttggtgtagcaataggaggttcttcttctctagttcttccctcataaacgaaagctgataataatgctacaatttcctccggttcgaaatcacccaagaaattatctagaattaattcagtcaaaactaattcgtaaccagagtttatttcacaagcaactctacctttaagaagaacagtattatgcttatcaataaatccagtagatttaagtacttccaatcttcgttcataatcaggtaataaattcaaattttcatcagacattaaatgattcaattgcttgatttcactttctaatttatatttcttatattgaggtataaaatgagaggctaatcttggacattcatatgattctaaagaaactaactgtctcattatattctctctttctaaaatattttgatgtaattgtaaattacccttgatatcaaactttctttctcttaattttaaagaacttttaatgacattggatacttctttgtcaaattcttctaaggcatctggctcctttctcaagaatgacttaaaatgaactttcaagacatatgcagtaatgtattcaatagatgttaaagatatgttataaaataatggctctgcagttttaaatttctcgaagttgattctgcagtaagatgtaaactttcctaaatatggaaggtgatttggttcgccatttggtaatgtattaggctctgtgaaacataaaacacggcaagtcatggttttggtatcatttctaaacacaaaaccaagtctatggttttcctcttcatctctatataccactaatcttccaatttttaaaactttgaagatttctggtgtatctgacaattctgtcattatatcaatggtattttgttttaatctaactgtaacatctaagaatttttcaatgtctctattacagctgttacatgtttcattttgtagatgttctaattctccttctaatgcctttattttcctttcgtattctggatgggaagtttggttggtgttttcactaaaggaatatttaatcatttcttcaacttttaatgcttctattcttaaaagatttaatatcatattatatgttaatctaaactgtgattccaatttggttgggacaccaagtgtaacctccttcaatgaaactcttgatagaggctctgtatatgacatgataataacagtcccagttttatctaatcctctacgaccagctctacctgccatctgagtaaattcaccaggtgttaaatctcttaagccattaccatcatgtttttgaatttcactgaaaacaactgttctagtaggcaagtttagacccatagcaaaagtttcagtagcaaacaataccttaataaagccctttgcgaataagatttcaattaattccttcacaattggtaatagtccgccatgatggacagcaatacctctttccaacagagatctaattttcaaaatttgaggtaattccctatcatctttctttaaacgagttatagatttttcaataaacatgtaaatctgggatttttctctattattacagaaattaataccttccaaccaatcagcatattcttcacatcttttcttactgaatacgaaaacaaccataggtaataaatcttgttttcttaaataattcaccaatgtagaccaagtctttttggaaggaccactccttctgaaaaattggctcttatttgaaccaattgcacctgctccacggctaccgccacgatttccgccgcgtcctccaccacgagaattacctttagaaatttccttggtgttctttccatttatagcacctgatttatcaccacttaacatatctttatgttttttaaagtttgcctccagaaattccctgtctggagtaattattggcattaattcattcttagtccaaagattgatttctaacggaactggtctttttggtgtagatataacatatatgtttttttgtttggttctaccgatccaagtagcaaattcatatgtatttggtactgtagctgacaataaaataaatttaacatgttgcggtagcataataataacttcttcccaaacaacaccacggtcttgatcattaacataatggacttcatcaaagatgacaaactctacatctctaattaaatctgcaccacgatacaacatagaccttaaaatttctgttgtcataattaaacaattcgcttcaggattaatttgaacatcacctgtgattaaaccaacatcaaggtccttaaaagtttctttaaaatccctaaatttttgatttgataaagcttttatgggagatgtatatattgttttagtcatatttctttttgccatagatatagcatattcagctacaactgtttttcctgcagaggtatgtgcagcaacaaagacagaatcgccttgttctagatggtaaatggcttctttctggaatgtatccaattcaaaaggccatgtccgggctggattaggaaccaactcttcaaaattagtgatcttatgattcaaatcaacaacatgtgcccattcttttcttttcattatatttttattggtattaatagttctaccaaaatctatatctgctggtagcaaattatcaatatcttcaaaagttttatcttgactctccaaggttggtaactccttttcttcttggctgatattattagaagataatttagagatggcattagataattctgagtttgttaattcttctgcttgcaatcttctgctaataatttcttcttcaatctctttagaattgtctacttgattcaactgctggaattcgtcatcatttaatgatgattctacaaattgagattcattttgtaacaaagagtcattaacatgaggtataatccctctcgacaatccatcagggatatcgaataatccatcttggtccttatgtaataatttcgtagagttgtttaaattacttgattgtatagataatccacctggcgtaaaaggtaattgttgggtgctacctcttatggtgtttccatgattattgatacttctggtcagggataaagaattagaagcattggcattgatgatttctcttagtgttacttcctctttaaaactgttaatcttaccttcaataccttttcttttgaaatagtaagcagtgcgtactaccggttgtggaatagttaaaaattctttataatcataatcttctgagttcatctcaggaacttgttgaacaacatccaatatagaccatggtagaatattagtgggagtcaagtattcttgcttaagttcattattaatctgtttctttgttttagaatcatcagataaatctaccttcgttaatttatcttcaaataatttaatagtggggtcatttgtaatccctttcaaagattgatataagtcttcaagagatttttcggtcaagtccatttttattttacttctttggaccaatttagcaaaatcctaatacttggatatatatgtatagatttaaaaaagcaattggacagtagaagacggcactcagaagtggaggcgaaccatcgttaactgtgaaattgtaatcttatagttttatttcatttctttgttttccagtttgttttgttgtttgataatcggggggatgaaaaaagggaataaaaaaaaaataagaataagatcgttgaaggtaaaacagaaaaaaagccaagaattaggtgaaaagggagcaaacttatataatatataaaagattaagtataaatacaggtactgtgaggtcataaattgaatccatctctcaatggatgggaatgatttgtttgacttagcagaggggatacttttactcctctgtacaacggaagagaggaaaagaggaaagatagaaaacaattatcataaggcaaaagtgttgtaatggtataaattacgtataaagatatgcttataaatatagatcggtgtgtgtatataattacaataaaaatgtataaacatgtatatagtatatctttggcattaatctaggtctattctatttttttgtctctttatttatttttttataggtaatttgtaaacgttgcaattaaaagtcgttcaaattttaatgttacactacatgcagtctctatttaaaaattagtaattaattaattataatggagatgtgtgatgacacttgaaaactattggaacagaaaatagaataatgtggtatatgtttgtatccatcatatacatcgcttcacaccagatccaaaaaagggaagatgggataaatagtcagactacatatcatatcatgttacagcttactcctcttcactttcactttcatcgtcatcatcatcacttgaggaagaggaagatgtggatatagataaggatgccttatttagagggtttgttttcatattcgttggtgatccattagagcttaacggagaagcatgttccaaataagccaatttgttcttaatcttttcaatttgtcttgactcttcttcttgactcaattgtcttgattttctctttttgttatttatagtagaatttggagataatggtgaatagtctctatggtcattatgatcacttaagttattggcattaccattgttgctggcagattcatcgaattgtctgaaaaatgtgttgtataaggttaagatggtatcattatccaatgtgtctaaatctaactccacttcttcttggccaacgttatttggcataattattttgataactttctccaagttagtggaagaaagatcattgatatgttctgtaatgcattttttcatatcataagttacaacagtctttaatctttttctatcgcggtttaacttactagatttgtttggtcctccgcttcttttattattcatccgccttctatttgttgacctttgttgatatttagcagtattactttggcctctcaataatcttctttcttttctaattctttcaatttcctgtctttttaattcttgtaattcaactttcattctggccaattgctcttctaaatattgaatagcagggtttgtaattgcggtttcatcaatgtcgtcgtcatcatcgtaccgatcattgtcattttcatcatatatgacatcattatcgttgttattattattaaggttattgttaccgtttttatcattgtcatattcatcatcattataattggaaaaaattggtctatctgcccatttagaattaaacacctcttctaaacgatgacccatcatattgacaattgttccatcgggattgaatgcgtaacaattgctaaacaccaatttcatatctttttcgaattcttctaaggattgatattcccaatttgataacttgttttgcatagtacctaaatccattggatgtttcacataatcaaaatacgtgggaatattcattgctacaggatcaactggctccaaaaatgggtaattgaagcttgaatatttctttgacatcatttcttttaaaacagaaccacaaaatttcattgcttgttgtaattttttagatttaggttttttattttcaattggataaatgtctttagatttaggaggatggatctgtctctttggtctaccgttgtgtgttggtgctcgtctaataactacaggttgatcaggatctacggtatttctacttctttttctacctttaccggcactattactactattactattggttgttgtattagcagtagtagtagtggtagtggtagtagtaaatgtatttttagtatcattagaaacactacctgcttttctattaggcctagagcttttacctaaaatcacagcttcctttgcaggcatatttagcatgtgtttttcgaaagctgcttgaatatttcttgccattcgggagatgacagatgttgcgccattaaaaattattgaattatttaccattctgtcaaaatcttcagtaatttcttctggtgtggcataggcattaacatttagttttttttcgatggtggacaagtccattggacgtttaacatagttgtaataaaaagggatgtttaaagcaacggtatctacaggcaataagaatggtttagcgtcctttaatcttttcactgcttttatagccatcaaagcatgccttttttggtgctcagggatagggtcatctggtaggttattcatatcaggttctggtgggggaggaggagcaggtttagtagtggcagggtcgattataggaatattactatcattggaagtgctttctgtgttggtaattttatctttatcggtttcatttgaggaatctgaattttttgtatttttttcatttgcatcattatttgaagtgtcagtattttcattttgttgttcatctttattatctatattatctgataatggattattattattattattattattattattattatcctgtggtgaatctaattcttttatatctggtgaaatattttgatctatagtagtagtagtggaggtgaaggtgtcagttgtagtagtatttgagtcttcaatgggattttcatttgaatttgtattgtcatcactgttcggtgtttgaacaggagtattcatattttggggagtagtagtggtagtggttgttgtggaaatagcagtaatattttcttccttcttaggtgagagtggttgtggaaattccatattattgttgttattattaatatatgtaattattttctctttttaaatggaaatatatttctgttattatgcggtgttataatatatgtataagtatatgtatacaaatatgtaaaagaaaaaacaaaagaagataaaaaaaaatgtgtatgtataattaattatacgtatagatatatatatagatgtatgtaataacaacggtaatgggtataaccagaagagaatgtatagaaatcgaaactggtgtagttgctgttaaatgggaagggtggcaaaggtctcttatctttattttgggaagaaaaggagaaaagagaaaagaaaaggaacaaacctcaattgataagtaataagagtattaagtgttatataatataatatgaagaggctaaaatggcttaaggtgaagaagcatgtgttacaaaatattaacatatacgtgtacatacatatacatatggacatacacatttaaaatatgtgcgcgaaagggaaaaaacggggaaaaaacaagaggagcagaacaaaccctaactaagaaaggagccaagaaaaaagtgcgacctaaatggcgtacataaaaggagggagaagaaattagtaaccctattgaaaaggtataagaagaaacgttttccaggaaaggaaggcagcaagacaagatgagacggggtaagcacgacataacacagcataacagaaagcgatgctaccacataacagccccaccaaccacgagggagaaagagggtaaacaaagtggacaggccagaacaacggcagtgtaacaaaagcagggcctaagagacagacggaagagagcagggccaagaaacgaggaagtgggaagaaatgggagagaagaagcggagtaggaggaaaagaaacaagaaacggcctgtttcagacaatccactaaaacttcttgtttcttttatacatttatatataaatttttttatgtaccaatttctatttttctttttttttcttcttttttttttttttttctgtttccttattccctgctaagttgccgtcgggtttgttgttgttgttgttgttgttgttgtttttatggcgtcggcgttttcttcgtcgtctttgttgtcgtcgttgtctttttctttttttcctttttatgttctttttctctgttttgtttactgttttaattctcttttttttttctttctttctttctttttgtattttacccgccatccgcagtcaaagaaaaacagaaagaagagaagggaaaagaaaaaaaaaaaaaaaaaaaagaaaagaaaagaaaaacaaacgacgaacaacaaaataaaataaaataaaatgtttcttcttcgtcatccttttgctttttgttgacgtgtcgtcgtgtttaattttctattttacttgtttgtttgttcatttgtttattttttgtttgtctatattgtttggatgtatgggtgggaagcagatcttgcacttctttctttcgccccctccttacttgctggtcttttttttttttattttttattctgccattgtggttgttatggctggtgaggaataagaattagacttatgttttggtgtaaagttgaaatctggttcaactggtcccagaaagtattcactcaatttgatccagtcttgcacattaaaggatcccagtttggtctccaattcatctctaccctgccagtatggtggcctctcatttaacttaactgggtatctttcacatatacccattggtatatatctatggaaaaatgacatgaattcacagaaatatcttctacattgcgatatcccgtattcatcagtgccccaatgttccatcgcatatcttgcataatccgagagaacctccattctttcactacttgatttatctaaatattgtctcgaatctatctcttcccatatccatggcttaattaatgcacctcttgccaccattatactgtccatctcgggtatcttctccgtgtattcataccaatcttcccaattgttaacgtctccattgccaacaaactggatccttgttccgttgtttctttcatgtttacctaacgatccttgtgtttcctcattgtatttagtctcctcttcacgcaactggacagcaactttcctaatatattcccaatcagctagtttcgtgtacctttgttgtcgtgacctgccgtgcaatattatacctgaaacatccgtctcatgcaccaatctcttcactaacaaatcagccattggattatcatctttagtacccgttctgatcttcacagtgatcggtatatctccggatgcataattcataccattcaaacatctgatcaatctagctgggttatctaacaatgcactacccgacccttgtctgtacaataagtcaataggacatccggcattcaaattgatttcactcaatgtaaatgatccgttttcagtgtcatggcaatatttggataacacttcagcagctttagatgcttgccatactttactacatgcaatctggacaccaaatccacctttttcactgatatgacatttgggtaacgcccactcggagttcgtaccttgaattaacggaacacctagtgccatttcactgtatgtaacatcgcaaccgaatttcttcatcaatctacgaaatggtagattgcccactgtggttaatggagacagaatcttcttccctttataatccaattttcgcttctccgatgcaaaatatttagtgtctctatatttcaaataaagttccttttgtttatccctcaactcttgcaattcggcctctctttgaatcatttggggtgacttctccgttgtgtcccttttattcttctcgttgatgttcattgcatcacgattctcttgctgcacagcatctatgatctcaagaatgtgatcgctttttgagaatggaaatctacgtttaatcagatcttgtttctgatcatatgtaatatgattgaactccctattaacttcatagataggaatatatttcatgacgtcgcctaatgaaaaggtttcatttttaactaaagctagatcctctttgttcaaatggtgagatagaaacctacatttgaaccccattgggcaaaatccaagagaattgaatacaggacaacctaacttgatctccccgtttggcgagtctttggtaaatgtaagaaacaccttatcaaagatctgagcacaatcgatctctggactcttattatctaggtacaacttgatatcatgattgaatctgcatgagtcaccaaatgggcaattggataaatcttcgccatgtaaaagttttggacagatcacatatttatttttgttcgtttctttcatctgtctattatcacgattcttattttgacctctttgttttttattgcctctgcgtgattttttagccccattggaggaatcatttaaattatcgaatctttctgaagaggcatcttcctcatcctcatctccatcaccagctaccatgacattattattactgttatccctgtttccagagaacggatccttaataatatattgcggtttcaaatgggctacccctttaggaagacattgtcttttttcaacagtggaaggctcgaccgtatctggatctcttttcattctgccacactatagtctacagtatatctgtatataaattatatgtgtccttagggtggatatccttgaaagtgttcaacgtaataaagtaagatacaggtacttcttttaaggaaaaagaaaaaagaaaaaaaaaatgagaacaaagtatatagacaagaccagcctgagagcagtctttgcactaatggagataataaatgtatacaaatgttcctctttattccaaaaaaatttattgcttcttcttcaataaactctctcgttttttttctcgagataatctcatcgaagaacttttatttatttttttttcgcttgcataagaatataaaaaaaaggaaagaaaagaaaaaaaagaaaagaaaaagacaaaatcatctagaagggttatcctgtctacatccatacctccaataaatgttcggatgttgtttttttatttccgttcaaaattgctccacacccatacacctcttgccccttatttctttttttttcattttcttttcttttttttttgttttgtttcactggaaaaaggtattgtttcaggcgatgctattgttcagcatctcttgttcctaagttcccaaattcctttttcccctgtcttgccgtacagagttacattttttgtgggcatttatactgttactattatttattattatcattatcagtattattattattattactcgcaatttactattacgttcattatcgctattattatcactattattatcactattattatcactactattattattattattattattattattactatcatcattattgtataatcagattactggaaaacaacttactttttgttaaagtggaaaatacactgcactgtaaagcgaatttgggtttggttcagttagttttgcagtttaacaaagatcgtttcgatgtgttagacaggttgcctttggtaagattatcaagtaagtgattgaaaaaactaattgttagctaaatcctcttatctataaggtttctactctgctctccatatatttagggtcttctatctattatttaacatacttctactgtttttggagttatcatcctattgattaataagctatataatcgtttctacatatttctttctttcttcttacattttgtttcctccatatattggtgtgtcagtgttagtgtgtgtgtatgtgtgtgtgtgcttaacaatatggttttttctactacattggtatcaaataaaaatattactgctaattctcctcctgctagagagaatactagttccatgatatctcctaccactacaagtactacaaaaactgatattactactagtactactactactacatctgttgttaatgctgtaactacaagtacgccttcaatttttatatcccataaaaatagcagtaatgataataataataataccaaggactataacaataataccagtaaacactacaataatacaaatattgcattgagcgtcagtccgacctctacactccctataaataacgacaacagtaataataataatgataaccgccaaaacagtgataataatcgtagcatgggaaatgctatggacttaaataagataagaaaagattcaattgcacattcccagggggtaggtggtgtttcttggggatccctcacaatcggttcatggttaagagatgaagtcatgttacgtggatttaataataacaatagcaatagtaatagtaatagtaataataatagtaatagtaataataatagtaatagtaatagtgctagtaatagctataataatataatggggactatgatggagaatcatattggttctaattccaattatacaagtcattcaaagatgtataatgctaataggaactccatctcttatagacggctatccacaattaataaactgaataaccctaataaaacaataaaagtggaacatgatgattctaataatattaccaacaccaacagtaaagacatcgaccatggctatcgtcatgatactactaaaaataataaccatgcaaatgattcctattctaatttttctttgaatacctcagacaactccgatgtgttgcatttgaactcaccactgagtacgactagtacttatctaccttatcttgagactcagttttgtagagattactcgtgctgtgggttatcattaccaggtttgcatgatttattaagacattatgaagaggctcatattggaggcatcggttataatagtggttttaatagtggaaatcatatcaattacaactattcgaattatggcatgaaaaaaccaaataattacttaaaacaacaatatactatcaaacagcatagaaatggtttgcaagaacacctgaaatcaaggaatagtcatgaaaacacttcattatcaaatagtatatataataataatatgactaaaaatgaaaatattcaaactggttctatatccacgccgaaaaacaaggataatttgaataattttacttttaataatgataaggatagggatataactgtacgaaatggtgcgaaagttactacaaataaagatacaaatatcaacaatagaaataatggtaacagtagtaatagcagcactactactactggtggtagtgatgataatagcagagtacataataataaaaataataactctctgataggaactagcctggatataggtttaatgaataatggtttgttagatatggagtttgacccttctaataatcatggtattaataggatgtccaattctacatcacatgattcgaccaataatatgggttctgatcaaaacttaagaaataatatggtcccatcttctattatcactcaggactcattaaacattggatctgattcaagccatttagatttaagtcatggccttggtgttatagatgctgatccacattacagtaacgaaatagcagtagaagatgatgatggtgataatgatattgacatgaattctgatatcaggggtgttggtagtaataataataacaataataatagtaacagcaataataaaaataatggcaatatagctatgaataaaaataacaattcttttcataatttgaaagagtcagttaattccttagatgtaactacaaatggtggtcataattttcataatattttaatggaaaattctgacaatttgaataatttacttatggattccttttctataccacaaattcatttgaatgataatatgcatacacataataatggtaataataataatagtcatgatgtactgggtggcatcggtaatagtcgatcattcatggatgatacgattcataatgatgcatctgggatggcacatcaagacacattgtctaatttgcacccaaataatgacgatgatatgaataatgatgatatgaataatgatggaaatagggtaaattttatcgatgacccagcaagaagactgtatgttatggatcatgaagaacataaaccattcaaatgcccagttattggttgtgaaaagacatataagaatcaaaacggtctgaaatatcatagattgcatgggcatcaaaatcaaaaactgttggaaaatcctgatggtacatttactgttttggatcctgattctaatgaaccatatcctgaaggaatggggtatgaaaaggataagccatatcgttgtgaagtttgtggtaaacggtataagaacttaaatgggttaaaatatcatagaggtcattccactcattaagtcttaaaatagaattagtaatactattcttttgtttgtatgttgttttccctttcaatctataacattaagattccttttattttgttacgatacattagttgttataacattattataataagaagaagattaatttttttacttgtattatattgattatttttgtgacgcttaatagagaaccatatatgattttaaaggtatgtagataggttcattccgatatatatatatatatatatatatattattattagacatatttattagtaatcagaggaatataataaagtatcttctttagcacatatcaaactatctctctgggtaaacatacgattttatgatatctatataacatgacataactgtctataaattatgatattatattttattaagtgagaataaatctgtatttctataacctatttggatatttttatgtactgaaggagaagatgcagaagacttatttattaaacatggggaaaaattattgaaaagaaagaccaattgactattaaaaataaggatagtatttatataatacattatattaagcaaatagagaaggaagaagaggacgagagagacatccaagatccaaaggtagtagcacagcttagaatagtttaaatcattttttgtgtatttgtaacgattctacatttatttatttatctattaaataaagaatatcactagatataatcaaacaactaaataagataatgaatattaacattgcaaccccgttccatatactacaatggtacacatatattgtgatgatatttatatttcaattagttattattttcccactttcatgtataatatttaatgatttatacaatagattaatatcgttagattctattcaaacgattccattaaatacactggtcacaccacagaattataggtttgaacaatcttttatcagatatgacttcagcccgttgcctcaagtgttacgtagtgggattcctcaattgattccgttacgttcaagcgttgattattcattagatatgaagatcgagttttattgtcaacataggttctattcaaatatgaaatataaaagtaatatggaaataatggatactgtaaagatcaaaatttggataaacaatgacccaaaaaaccaattattgtatcaagttaaaatgccagtaatttgttcgaataaagatacaagtgaatcaactctttccttgtcatcgacatataagtcattcaaaggggatcagttactatcaaatagagaaattacagatcgtaccaaatcgttgctttcagggaccaaacggtctttcatggacttatatcacgaccactggttaaacaagttttcaataagggatacaatcaagatccctacgtgggcgaagagtgtccatatccaatttgattcaatttctacatttaccgtacctaagacagatgtattgacagattcgatcgataaccaaatgaacgttaatataatgaaacgtttgacatttgaacccgaatcgtctattctacaatttagaacaatctatgagcaagggataaggaattttatgttggttcactcatggatcacatatgcaattggtgttaccattgtacactctattctattgattgtatttttactggtgggactttactgtttttataaaattcttacaatgagaccaagttccaaaccagtaaaataattgtatcaacaaaaacctttttatgcgaaatatgaatattggctatgtgcatgtatatgtttgcatgtgtatgtgcatttgtatatgtatttgtattggtgatggctttcttatagcaatttgaaaccggttgggtgacgttgccatataaaaaaaaatgaaatattaactggtggataagaaaaaaaaaagaaaagaaagaaaaacgaaataaaaaaattttttgtgtagtttttcatacaaagaagagatgaagtgatcaatgatgtggactctgtggtgttaaacaaaatggaaggtgatatcaagtagatcatatccatgttgctgaaggaatttactgaacagaggtagaggggtatggataaatggaggattttatgtccagtgataaaatgttggaacccaaacgtctaactgtggagaatgatccattgcatatcattaagacaagactacaaacacatggtagaccagcaactatttcaggtccaatggttagatactcgaaattgccatttagacaattatgtcattattataataccgacattacatacacaccaatgatccttgcgcgtgaatttgtcagaaataggaacgcaaggattgcagattttacgacaaatctggcagactcaccagtagtggctcaggttggagttaataacaccacggatcttttaagagtcattgaaatgataggtccctttgtggacgggatcagtgttaattgcggttgtcccataaaggaacaggttagagaagggattggatgtgcattgatatataatgaagatttgatggtcgatatggtaaaaacagttaagtgtaaatatggcagtaggttaagattggagatgaagattagaatccatgaacatgacaaacccttgagaactttaagactctgtgaaaggttatgcgatgcaggtgtggattggataaccgtacatggtagattgaaaagtacaagatcatctcagccagtggacctaaatgcaataaaatatattgttgatggattgaaggggaagaatgtacctattgtggctaatggggattgttttacagtagctgacatggagagaatacaatcttttacaggttgtcacggcgtcatgtctgcaagagggttgttaagcaatcctgccttatttgcaggttacaataaatgtccatggggttgtcttgaacgatttgtctactactgtgttgagattggtgggttgccactacaattgatattacatcatgtttattgtatgatggagaacatgcaagttatgagaagatatttgaaacaaataatgtcattatcgagtataattgacttaattctttggttagagacaaattttgaattttcaagatatggtgaagaaggatttggtgccagagtggacgtaccatacagaaaataatcaggagaaagctgtgttgaacacctttctgaactcctgttatagaaccaacaacggatattcccgctagtatttttcaccaaacacattaacactatttggtgacacacactcaaccttattcaatttcactttatgcttctaatttcttttttttttttgttttcagtttgtttatttgttttgttttttttttttgatgtaaccccgaaagaaaaaaaattgaaggaatcaaagaaaatttttcgttttttattttctgttattgagagatgggtttatttataataaggtgagagcctgggttgtcactaaacagaaaggtattctcgaaccacattttatcttgtgttgatgtgctataagtaacatgatgagatttattatcatttctgtttcatagttacatctttacaactcaaagatattctaattagacggttacatcctatccatcttcctttttgtttttttgttctttagagaaatcgttaaaagaatatatgaatatataattaagttcattcaaggtttcacagtgatgtgcgtttcaaatacgggtctaaagaaaaagagtttaaaatcaaacattcataatattattcaaagatggaaacttatatttaagagaatctctgaagaagtattggatagtctagatgaaaatgacatttctatctctgatgacaaaaggatagaagcgctttttaatagtaataaagatgatgatgatagcgatggtgatattgatactgatactaatatagatactgataatgttgagaagagaagaaataataagcaaaacaagaacattcaattattaaataagagaggggcatcaaattctactaatgctagaggtttatctaaacgttctgtatctaacttttcaagtattaaagaaaatgataatgaaagaaaaataactgattctaatgacaatctacgtaacattgagaatagtgataatattattgataatggcgataataacaatatcgatgattcatataaaataacatttgataattatgatccaattgaagaatgtaaaaaacttcgaactacgataaatgggacattttatcatgcagggactgtatgggagacaagaagaaaactttggactgaaaatgtcacaaatattgatccgtctaaagaacataatagggacatattcaaatctatcccagaacaatattattatagagtgtataaaaaattggtgattgacgataaacctcttcgtgaaccattaaatttagaggatgcaataaaagtgattaattcgggatggaaagaaactaaaacctgggagaacacttctaaagtcttacattagttcaacatatctcgtctttttattaatggtagtattcttatctttttttatttctgttttttattttgttctttttttgctttgcatattttattaatattagtacatatacatacagatatataaaaagactattctttttgatttgctttgattgtttgtaatgtttgttcaattattcttaaatccctatctactacagcagctttagtttgtatattatagtctttttccatgtagggggcgaaatgttcatacatcttagttaaaggatcaacacattttgttttcaacgtttgatcatgaagttttattaattcttttaattggatttcctcgatataatcattatttctttcaatctcttttaatgttttcgaaatttctgtaggaacctttgaatgagtgatcttatccacaagatgacttaatgtatttctgtttgactgcatcctgattatatataatcagtatacaatttaattttatctactttaatgcttggatataaagcaatgctgttgatattagtgctgttataatgtatatatttacttatttctatctttattgctatatcaccctattaatagtgtttgtactgttttcgtaagctttttatatttcgttcatttttaaaaaaaatgaaaaaaaaaattgcatatataaatataatacatataaattcaaatagtagatcattttatagagagaagctagaaggaatatttctatagatagcagttgaacatatacacatatatatatgtgtctgtgtgtaaatgaaagcattttttgtcttcccattctaataaggttggtggaaaacaatcatgaaagcaaacttttgaacaatacctaattattatatatgacgaatgttcttatgttttttatttagtctgattataaaaatatacatgctttgatatttatataatcaatacacacctaatctatacggatatttataaatattataatactctatttcatatttttaatcattccccccttttttatacacttgaaacaaagttaataatggcagaacaatatttaaccaagtcatctaatctatcattacttttatgatattgattccactcccttaaggcctgagaaattttttcattcttattattcatatgaatcacatcaccatgggcttttaaaagaagactcataaatgcttcgtacagttcaaaattcttgtttgatttcaaaccttgagtaatggattcaataaaccatactatttcatcgtatggttcaaatgaattaagtgatctgatctccaaatctactgaatttgatggtaattccactaaattgtttaaaaaattagtgtagtctttggactcataaccttttcttaatagtctagtgaatttagattcaaattcaacacgaccagtgggtttgaatttttgcagtaactcttttgcattttctttatcttgagcctcagcttctcttttttgaatctcttccggtgtctcatatataacaccttccctttgcgaagcttcatctccaactttattaccatgtaattgtaaaaagaatggaatattgttttctggtttctttggtggttcaataggtttagatctttgtttaataacattcaaatttagtagtgtattcattttattccttgggcctaaagacaaagtaattaattctttattaatttgttctaaggaatgatagacattagataattcacgttcattatcctcatgaccttcatcattatctaatgcaccagcaagcatagaactgtttccttcaattgatgtagttggtaaaatagctttagaaaattcttcctcattgactgttcttgtggaaattgccttaaattgagacctgttagtccaaatgctgataccttttccattaacatgggtagttgccaacagatcaccatttggtgaaaattttaagtctgtggccacactatctaatttgactccatctatacatccaccagtaggcaagtcccatgttctgatagtggaatctaaggatgcagaaacaatccaacgtccatctggcgaaaaatcaaatgctgtgattctattactatgaccccataactgacgtactactttttgtgttacagcatcaattactataattgataaatcatccaatgcaagagcaaatagatcagatgatcgatgatagaccatcgatgtgattggtacatctaattgtaatttacctaataacgttgatttattgaaatcataaaaccctactaagccatcaagaccacaggataccatctttctattcataccatcaagtgcaatcccggttactgctcttttatgtaatttatactgtttccttagaataccactttgcatattatagatggatatagacccattagatgaaccaaccaaaccaaaattaccacattgtgagatggctacggatttaacaaagcctgcatcattggtggaaaaagtccatctccctactctcttagatctcatatcccacgttctagcaattttttcgtccttatgggcagtgataatgttttcccattcccctaacctagcattttcgatagcaattgaaataatttcagggaacttctctttcattacattgccagccattctaccaccatctggttttttatgtactctttgggataattcttgactttgagcatcttttcttaaagaaaatccccatagagttctatccctagaagcagacaaaaggaaatgggactcagaatcagcaaattttatacatgatggaggttgagaatgaccacctctggaacgcaagaatcttggtggttgcactaccgcttcgctttcagtttgagacaaagatgggtcaaatacgtattctttcaaggtgttatcaccaccagaagtaaccacaattggttgaccatgtaagaaggatgctcgggcaacgccaccaaaggtctctttatgtacatttttcaaaacagagattctagaacgacgatctaaatcataaaagattaaatcacccaaagtggtaccaacacataaatgtgacaggccatctgttctaaaagataaagatgagacagtagattgtaagatcttaatagtacgtatttttctaccctttcttagattgaatataatgatatctcccgaagaagtacccagtgccattatatctaaagctggagctggctcaacacatgttaattgatcagtgaactcatcagaagtgtacagtaatttccctgtctttatattatacaataagatgtttgacttagtgacaacgaccagtttatttaaataagtagctaaatgagttagactaataatttcaccaccttgtagattgttaattgtgaattttgtatagaaggtagtagcatatttatcatttatagaattgtcctttttgtatacgtaaatattattatcatcagtggaggcacaaagataatcaccaaagacagataaatgtcttacagtggcattagttgcctgtaaatttattgaatgttcctgaacaccacgtttatagatgccaactttattaccaaaagcaacatacacatagtggaaatgagcagccaaagcagtaatttcagaatcagtttctttagcagagacaaataaaagatgtaaagtatttgcatcataaatttgaaaagatttcccaacactggtaacaatgtaaaaagtagaacctagtgtacccactgcaaatggtacctcattactgacattaccgacaattctaaatggagcaaaaatcctagaagcataaacagattttgctggctctactttccttttcttagtcacttcagtcattgtatttttactctcagtagaccgttcaaatagatctttatcttgtcaaaaacaattggtaatccacttaagaggaatattactaataatttaataattccactgtacaagaatgtgttgatgccacatacaaaccttttcttttctttcaattgctttaatcaatcacatcgcaaaaatttttcaagctccgctaagtcacgtgccttttaaagatagaaaaataaataaattccataaagtcaaaaaaaaaaaaaaaagataaggtatttctgaatcaaaatcgcacatagcttgaaagagtgaaaggaatttgcttttttaagaaactagctttcttatatcttaagggcatgttagtaattgatgcagaaggaatatttcaacaaggagaaagtattaaagtgaataatatatcccttttgatgggatagttgaacttaaaaaaaaagagttgataatagtaatatataaaaatacacttcaaagaggaaaaaagaggttttattacccagagatttgttggttggttggtttattttattcttttagtttgcctttaaagttcaatggtggatccaagaaaacaggttactgggattgatattccaaaagaaaaagatggggattttattaatggtgagaacaataaaattatggaatcaatgtcaatatctccactgactttgaatagaagtacccaaaaggctatggaatccatagcccctattttagaaggttttaatccaaagacttctacaagcgaaaatatgtctctaaagttacctccagcagttatctctgccagtgaatcctcattagacgatataaataacgatcacaggttcaacaaaaattcaaatgtaggaggatcgttgatttctgctgatcatagccagttggtagatcaagcttgtaatgttacattagagaatttaaaattaatagaaactgccaggagaaattccatttcttctgatccccaatggcattctttaacaacacctgagcaaagtaatagtgaggcgtcgtctatatctgttaatacatcgggaattaacactcctacttctatttcttacagcatcttagcaggttcgagtttcccttctacgtcctcttccagaaaatcttcaactagtcattctcggttcacattgcctaaaattggaaagattggtgtatgtgctatggatgcaaaagttctttcaaagccaatgcgtcatatcttgaacagattgatggagcatggtgaatttgagacaattatctttggagataaagttattttagatgaacctgtacaaaattggcctacctgtgatttcttaatttcgttcttttctactgggtttcctttagataaagctattgcatacgcaaaattaagaaaaccgtttattataaacgatcttattatgcaaaaagtgttatgggataggagattatgtttaagattattggaagtagcaaaagtacctactgcaccaaggcttgagatcagcagagatggtggtcctcgtgctaatgaagatctgagaaagatgttattagaaaaaggtgttaagttggaacctattgaagaacctcattggagaatggttgacgatgatacgttagaagttgatgggaaaataatgactaagccatttgttgaaaaacctgttgatggtgaggatcataatatttttatatattatcattcaaagaacggcggtggtggtcgtagactatttagaaaagtgggtaataaatcatctgaatttgatcctacattactgtatccaagaactgatggttcgtatatttatgaagaatttatggacacggacaattttgaagatgttaaggcttatacagttggtgaaaacttttgccacgcggaaacaagaaaatcacccgtagtcgatggtatagttagaagaaatacacatggtaaggaggttcgttatgtcacacaactttctgatgaagaaaaacatatggcacaacgtgtatctaagattttttctcaaatgatttgtggatttgatctattgagagtttctggaaaaagttatgtgattgatgtgaatggtttctcctttgtcaaagataacacgtcctattatgattctgcagcgaaaattttgagagaaacatttctgcaagccaagaaaaaaatggatcttgtgaagcgtactatgcctcagataagagaagaaaagagtcaaaaatgggtttttaagggactagttacagtaattcgtcatgctgatagaacaccaaagcaaaaaatcaaacattcttttacatcaccaatattcatatctttgttgaagggccataaagaagaagttgttattagaaatgtaaatgacttacagatcgtagcacaagctttaagcattgcattagaagaacaagcagaagatcctgtaaaagttaaattattgtataccacattattaaaaaagattgattttcctggaactaagattcaattaaaacctgttcttaatattgaaaatgaggtggaaaaagtgcagtttattttgaaatgggggggtgaaccaacgcattctgctcattatcaagccactgagttaggtgaacaaatgcgtcaagattttgacttattaaataaaagtattttacaaaatattaaaatattttcctcttctgagagaagagttttattatctgcccagttttgggcatctgctctttttggggcaaatgagtttggcaatgatgaaattagcataagaaaagatttattggatgacagtaacgcagcaaaagatttgatggataaagtaaagaaaaagctaaagccattattgagagaaggtaaagaagctccatcccaattcacatggcctgcagaaatgccggaaccttatttggtgattaagagagttgtagaattgatgaattatcataaaaagatattagattataacttttcaacaagagacgtgaataaaatgcagttaagatggtgttgtggtgaggatcctatcttatttaaagaaagatgggacaaactattcaaagaatttcatagtgttgaaaaagtggacccttcaaaaatatctgaattatacgatacaatgaagtatgatgcactgcataatcgggaattcttagaaaatatctttgatcctcatggatgttctgaattaattgacagtgagttagatacacactctttagtggatagatatcctatcaatattttggcaaagaacaactttaaaattgtagagagtcagaataattccactatgtcaagttccggtaagacaagtgttggttctcttggttgggttttagagagtaacaaaatgagtcaagagaattctgcatttgctgagggtaaatttaaacaattaagagaactttataaattagctaaagttttatttgactttatttgtccaaaggaatatggtattaaagattcagagaaattagatattgggttattgacatctttaccattagctaaacaaattctaaatgatatagatgatatgaagaataaagaagcacccgcttgtgtagcatacttcactaaggaatctcatatttatacacttttgaacatcgtttatgaatcaggtattccaatgagaattgctagaaatgctttaccggaatttgattatttagcacaaattaatttcgagttatatgaaagtactgattcagcaggacaaaaatcacattcaattagattaaagatgtcacctggttgtcatacacaagatccattagatgtacaattagatgagagacattatattagttgcattcctaaattgtcgttgactaagcatttagatatggactatgtgcaacaaaaactaagaaataaatttactagagtgaaaatgccatcaaaattcacacctgtgaatattactagtcctcgtttgacatttcataagattaaaaagaataaattaaaaaaagagactagcaagtctgagacagaaggagatgattccacccctagtacaccgtttttagcgttatctcagtcatcttctacggtgtcaattgatggtaaattagagaaatttaagtgaaatattagtagtattatgatatgtgttatatattcataagaatagattatttattcatgtaattttgtgttgttaaataaatatgtgtatataatatatgtctaaaaggtacggaaattatttcattaatagtttatacttagcaattaagttaattttctttttttctctttatgtatttttggatatataataatattatagttttgatttagttattattaataaaaaacaatagtattttgttgagagagaataaaaatgtactaaaaaatagagtatttattaaatattcaatattgcgaaatttttattctttatatattaaattttaattgatactttcactagataccttttgcatttaaggagtaagtcatattaggattaaaataaaaagttaagtaaaaattttcatagtaagttagacgttattaggtaattctaatatatatgtattagttgattaattcgatttggttatataccatattcacaacaggtcattatctttaaatttctttttctttgatttgaatgaagggaagtgaaaaattgtgacttgttgcagtttctcactgctaatgagttttgttttagatattattgatcaaactttctgaatttgtttatttttttacatcttcatgtgttggtcaagacccaggtaatggtgaagcttttaacacaaacataaaatatttgcagaaaaaacaaatttgatagtaaagattctacaaaaaaaattaaaagaaaaaaacctgctttaagaaaccaaacagaagttaaaaaggacttacacttatttattatatatatatatacatattgtaaattgggccattttattatttctgtcttacataaaaataaaaacttaattataattttaaacaaacagtaaaataaataaataaaaaaatttgcagatatcgataagactgaaaagataaaaagattttgtatatatctaccattttttcaataagttaacaagaaaaataatgatcattaagcaatagaaaatctttaataatatattgtctgaaacatggaaagaacaaaaatagtttttacaagttaacttatattttgaaaatgtcaacttctaaactataaaaaaacagaaactttaataccttatacacacatatataatatatgttatcttatataaaaattataaaaaagttctcacatttaaacatatctaacctttaaaggtaccataagaacaagacagtgatttgaaagtctaccttggtaattattactatcaattttaacaagtaattaaagtataaacaataatgattataaatattgtaatcaaaaaaataaataaacaaacaattgttcttttatttgttggataaatttctaatcttccagaagactaatgttattcaacattctatctatatataatatcttgcaagttagaaatatttcaaacttagttatcaatattaaatgcttaccttaccgtgattctttcaattttttgatcagtataataaattgtggataataatcataaatgcccaatgatccctataaaatttccctcttacttcaaatttatttgtcatttgtcagaaccaattaatttattattaaaattttgtatctaagtattcactcctcttatattcttagaataaattaacattgttttttgtaaaagaagacctgtgatagttttgagttatctttcattttcttagaggatttacgacactttaacagttttttttattatatacaaaaaaaattataggttcaaaaatgtttgtaaaaaataaaaaaatatcagaatatgctgaaaatttcaagaaaagataaaactagattatagaagaatgcctgctgatttacaaagattttctttgccttcaacactgtaataaaaatatgtcctccctgggaagtaaaaaacttattactttattatgtgctaaatctctaatgtgaatatgtcctttactgtctcgaaaaagaataaaaataagttaaaacctgtggatttttcctcgaaattaaatgaatgtagagatatcataagagaatcattaatgttccaagacttgaaaacaatattggatagtactgcaaactcaattaaggcaataagatgtctagccattggtagctttactgaagactttccagccaggtaccaattagctttactactagaaattattgactatcttgaacatactagtgatactccttctatcgttgtttcagtctatgatcctgtatttacaaatcaggataaagattttattaaagaaaagggttcattttggtcaattgatgaaactttgccacctaaaaatttcgaaagtgattctacattattctttcttccgcacgctcctttagatcttacagaaaacattttagttaaagagagaccgaaatattttttggctaacaacataattcaacacactgatagatatactgcttcgcaattaaatacaaaataccctgttttaagtaaactagcaaatgtgttaagctcttcacaaaatgaaaatataaaaaccaacaacactaatcgagaagatttactcaaagatgacggattcatcataaatgtttctaagaaaaaacatagaagaaataaaaacaataaatatgtttttgaagaaccacatattgattattctctaattgattcttatttttatgcttgtaaaatcttaaccagtttcaataatggacaacatttaaaggatcaaccctggattaattcgttctctgatttaacttttcatatcattgaataactagcagtatagatatgtgtacctatctctacactaaacctgatagcgtctacccattatattgccattccaagatccatattcttttttgattcaaagaattctgttatatcatttttttaactataaaaaatagcattgtaactctgaaataacaacaactgtatttttacaacaaagatggatgtctatctgatttattaaattccgcatatattatatatttcttaagaaatagtaatactactataaatccttaacttactaactgctctttcattaaataaaactactttttaaaaaatacatttatcacttaagaccatattaataaattataaacacacacataatatctatttttgaaaaattaatatagtgtaaataatgtagatatataataaataactaatacaagccatagatattttcatctttttctaaagaagaatttggattatatctttatctagttttgataaaattcccaattatcaagaattgccttaatacgatcggagccagtcaaattgtaaacatcttggaagtattctttagttaattcaaatggcttagcagttaggtttgggatatatttgccaattaatttgtctgccttaacattttccttgacaatattcttgtttaggaagttcttgaatggcttaacaccactccttaagtaagaagaatggaatggaacagaaataccacgtaatggaatacaagcaaaacctctttccaattcaattggttgcgccttagctaacgattttttggagatttcatcaacgatttcaaacaaatgagattcaacttcttctaaggacattgattccctcaatttactaatgtcgatcttttgcaatttaattaagttcaaagtgttagataaagtgtctaatgctcttaaatcaccagcagcaacatactgttgattctcaacattgtgattaacaatttctaataaccaacctgttttcttggcaactttttctacaataaacattaatgcttcttgattgaatgtaggagaaactctacttgggttaacagcaaccataccatagttagatctaccttgttcatctcttggaactgcaacttgcatagtcatacctctgtagaaaacaacttcaactagagattcaatagacataatgtcagctaaggaacataaggcagcgtattcacccaaagaatgaccagcaaaagcagcatcagctggaattaaacctttagaccttaaatcttcaaaagcagccttttccattaaagtcaaggctggttgagtaaattgagtagctgaaagcaaaccacttggtgatttaaaggtgtatgaataagtgtcttctttgatttctttaaagatcttttcggtcttaatctcattgccaacaacagtttcgaaaatcatggaagtatagttttctctgatctttctacccttttcaccaccgaagtaaattgtcaattcctttggattatttctcacaatatctaaaatagagaaaccatatgtctttttgaagtgattgtcagctctatcccatacatttctagcgacagcagatttttcatacagatccatacccataccttgttcttgagaaccttgaccagtgaaaacaaatgtggaaactggttgctcaatttcagcttcaccacttaaaacaacaacatctgcctcattcttagtttcaaacttaatcaactttctaccattgatcataccaacatgttggatagttgtttttaatggtgtatttggcaagaccatattttggaatttacaactgtaagcacgaactctagatgaaacaccatcagcaacagagttttcaatcaaggcacgaatagcagcagaagagtacataccatgagtaatagtacctggtaaatcagcatagttagcaaagtgacgagaaacatgaattggattcaaatcaccagaaattctaccataagtttcattagtgcttggtgattgtgtatccaaaattgcaattggaatagcattttctaaattgactttctgttctagagtagaaccatttctttttaagaaatcaacaactggattaccacaagattcagaagcggaatagtcaacaacaccaatctcaaccttttcctttgtaagcaattctaacttaataggaccagtacattgaacagaagagaaaacagtagcattcttaaatgtaacctcagtttcagtttcaaaagtcaaagtttttcctaataagtcgatatcctcatcatccaattggaaccattctttagagcgcaaaacagctacatccttagcagatgtaacttgcatttggtaaactggttcagtaattctttggaatgtgttttggaaatcatcatagacacctctgtagaaaaaggaggacacaacttccataaccggctttccttctctggataaagttccaacaacctcaacaaccttaccagttggttgattaacaacagatttaataatagcagaagtagaaatcacatcgccctcttgtaatggtgatgcacctggaatcatcctatatccattagataagtgtactaatttcagtaaatcaccatcaacagtctctgggaaaatagctttaatgattgctctccaaccaacaacaattgcaaaatccattggagcaagtagctttctacctggtctagcaacaaaatcttcacaattattaccaattgcataagtaaattctgcgatggcgtcagcagtaattataaaatcagaacccttgatgatttttcttggatcgaagtccaagttaaatggctcatcaatccatagtttccaatacatttctttaatacgcttgttacgatcctccatgacttcagaaattggtgcaaaaccatcatctatattgtaagtgtaaagcaatggtaagacgactggagtaccatccatagttctattttcaattaaattcatttcaataatattgtctttgataagtcttaacgtagcagtcttcttttgttcaccttgaatacgttcagttaaagtgacaacagtggaagatgaatcatttggattttcaatttcaacaatcatacgatgacatggcttgaaaaccttcttagcagcgttgtcagtgtataacttaccttggacgaatctttctgttgtaaagaatgcatatctccaattcttcttattcccagctaataatttaaaccattcaattggacaagtattagtatgagcatggaaaacaagcttctgctctgatttttcaatatcagtcataactggttcttcaccaccgatgtattctatgattggaatagaagacttatcattattatagtaatctttaactaatctctcaatgtgtccttcatggatactgtccataatatccttaattggttcatcaattttcttggtaaattctgcagcaacaggaccatgtaaaatacaagttctttggacatcttcatcaataacagcttcaatatgttctgattgccataaagaatccttcttaaagaaaaattcaaatctatgatcaagaattggaacaaatggaactggtttttggaatgggttttcacacatgtttaaaaagtgatcaacatcttgtgcattcatatattgttctttagcagctggatatgcattaaagacagcatctaaagccttttctggttcattcaaaacagtataagattgaattaaagaagtcgtctttttatcagtaaaacgttcttcgacacgacgcaagaaatcaccagtgaagtttcttaaagtgacatcaatccaagaattcgtctttctaatgaacattaattcaaccaatcttttagcaacttcttcatatgtcatttgagtaatgtcacgaatttcaccatttacagtagcaaaccatggcttatgagtgtctgcattcaacttcttaatgatataatctctcttagcatctaaagctggttgcaatttattctttggtagattgaaaatagtgtcatccatctccttccagaagataacacaacgtgttgcaatcttgtgaattggttcacccatttcggaacgaacagttagaataccaccagttggctttttgtaagtaccttcccattcagaatctggaacaccagaacaatcaacaatagcttgtttggcagcataagaagtcttagtttctttagcaatcataactctagaaccaaataagaaaccatcaaatggcattggtgggtagtcaaacttagtagaccattcaccggttaagtatgggtaggtgtcatcagcagaaccgaaaccagaaccagctattaatataatattagattgtcttctaatctttgaatacatctgtaacatattagcatggaaatcttcgtaagagtggtgaccaccagctctaccaccagtccattgtaaaagaattgggaattttggatgtgctttggcaatactaataacttgagaaatagcatcaatagaacctggtttcaaacctaagtaagtcaaacctaaagtttcaatatattcagtagcaacttcaagagatgggacaccagcacctatggtaacaccagcaattgggtaacctttaactctcaattctttaatcaaaggaataccccattgtaacattcttggattaacatagattaaattaatagataagctgtaacctggtttaatttgagatataatttcatcaatagctttggtcataccttcagctgcaaagtaacccccaccagctaattcaatttgatacccagcattgatagttgcagcaacaaattccggagagactgttgttggagtcatacctggaactaacaatggtgctctaccaattaatctagagaatttggtatcaacatatattttaccattcttattcttaaccaattttggatgaaattcttgtaaccagtcttggtttctctttagtccagatacagagatatcaaatatctcttgtttgaaaccataatcatcttcagagtttaaatctaaagaaccagctacgatgacacgaacaccagtaccgtctttattacgatgagttagaacacccaaaccagaagcaccacctggaccgaaatcaaggatgtgagaagcagaaaattgacaagcagtctcccatttgactggtaaattaatgatacaatcgacaattctagcagccaacgaaccctggtacttccttaaatcttggccatcaaaggtgtcatagactggaatcttaatatcagattgtttgaaatcgataccttgatatgttaagtccgaaaggatggcatcgttggctggactcaataatggagaatggaatggagaggtaattggtaagaatctattaaagaacttcaattttctttcactgtatggaattcttgcttgatccaaaccagctggagctttagcctttcttaaaaccaaatttaaaccatataaggactgtggtggaccagaaacaactaaatttctagcaccgttaacaagagagacgacaacgtgtttttcctttggtaaatgtgaattagtttcatcaatgtaactttggacttgttcttgcgataaattagaaatagttaacattggagatggagtaccttcaccattttcaatggagtccttgacaacagaaggtggtaacgaagtgtttggataggctaaatcacaacgtacaccaataaagaacaataatgaaattgctttcttcataatgttgtaaaaagaatcccatgaatcggcttctgcaatagcaatagcagttactaaaccttgagaatgaccagtagcgccagctaaatggtctctcaattgacctggtgtaaaatctaataattttgctgtaactgcataatggactagttgaataacaccaattaatggacatgagattgggatagataataaataatcaacgtctggtgtttttgatggtgtttctaaccattccaataaatcaaaaccttgagtaaagaccttttctgcacctggtgtggatttaattaattcatttaacgtatcatgagaagtgtggataatatcggaaatcaaaacattatagacagtatacagttctcttaattcttcaaaataatcatctgtattaccttgaccaccaaagattgccactaattcagatttcttatcttcaacggattttattaaagcagatttcgatttagcaatggcaactttaccagtagagataaatgtagcagttaagaaatttcttatcaattctttaacttttggcaatgtactggattcattctcttgcaaaagtttagcagcaaaagtatgaatatcattaccttgcaaataactattttcaaattcttgtagagcgacatttaaaacggcatcgaattgcgtttttgtttctggtgttattaaagaagagatataggccaaaaacttccctagaagttcagcagaagaggaaggttcttcatcagcagcaaacccctctgttggatctggtaaggtctttttaaattgttcttgtaattgaaatgcagcaaaaaaggagacgtttggaacggataatttatgttcaatggaaccgtgagttaaagttaaggatcttgtagtcattctagaaggggtatatttatgtaattctttttttttttgtcggactagataaatgttaatatatattaatatttatatttataagtctgtgcacgtgcgcgtataagtatgaataggttgtatatcgaaaaaaaagactctataaggctctgtatagttagctatagtaaatattatctaacctcttttaaaataattaaactaccacaaaagttgtatgagtgtgtatgtagtttgatagataataataatgtaaaaagaaagtaaaaaaaaaagaatatatatttcaaaaaagaggcagtctcacttagaatgttttgttcttttaacttcaaaagagatctcttttttctaaaaccaatgagaacctaaaagaattgtgaagagaaaattgacaaagaaaactgcctcaaaaaacatacacacacaatcgcggcgagtgatacttttataggtagatatgtgtatctaacaatgggtcgaaagaagattatctttttataagtctgaggaacagaaaaaaaaaaagaagaacaattctgggaacaaacgacagaaacaaccaatgtttacttgtggaagatgtagttcctataaagaaaaaccagttgaattaaccaagtcacaaaagtcaagggacaacaacaacagccggacaaacttgcgccataaaacctgaaaactagtacagattactgacaattagacaacaacgattattcaatgtctatcaatttgtatgcgttgcgaatgtaaacatatcattttccaccatgcaaaagaaacgatttattattcttctcgatattcgaccaacgtctccatctcgaaaaaacactcaaacacaaaaaaaaagcgaaaacaagaaaaaaaaacagcggattttagcacatggctactaaattttcacatgcacgttaaaaaatttatattcaaaaattttttttttattttttacttattttttctctagaaatggtagggagagctttttggttgtaagaattcctccatgtttcaaaatctgataatgtacacacttattttttatctattttttttttttggttttattcttatctttactggctttctgacagctaagaaaagaatcttagacatttttcgaaaaaaaaagagacaaaacaaacaaaccatggctcataagcctatacatgcaaataaagtaaatggtgataaccatctatacaataactgaaccacagtacattagttctcaagaaattatgcaatatcactttttattgtaatacaactagtcgactagttcgaacgtatctacacatacatgcgttacttattcaaatctcttatcttatattgtatatattcatatacgtgtatacaagcacacaagtacatataatatatccttagttgatgataaagcttttattattgtattattagaaatagttaaaaatattggataatattagagttcataacccaaggctctttttatttacttatcacttgatgtatttttgtgttcttttacactaatctataatgatttggaacctgatcctgacatgtactttactacataataacttatatactatctaagtgatcaagtttctaaatgcaggagctacaatatcgtatatacttttcgtttcctattaaacatcaaaatgtttgctgacaaaatacgactgtaataaaaatgtttcttcttttctttttgttgtctctgacattttagctttcacatgctgcttgttgataaaacgaataaaatttttttgtaggaagaattcaaaaagttcaaaaaaaaaaaaaaaaagtttcatgaagaccccatcactttttctaaattcttcttaacggtggcaaattttgctatctagaaaaattgaaccagcatgtgaaaattcaaagactgatttttttgattgataaaaatttttgcctttttcatacagtcctatttttcaaaaaaaaaaaaaaaggaaaacgtggaacataacctaatatggatagttcaggtctttgataaaactaccccaattgtatttttcaacctttacagatatattttaaagcttgcaagaattatttaaattctgccattttcgtttctctctctctctctttcctttttttttttttttttttttttttttttcgttattatcatcttcattctattaataatctatatagaataaaaaaaaatctccatgtacaactaaagtttttttttaattccatcaatattctatttatcccataactaaccctagaaaatggttgagtaagaacataattgattatattcctatcttttatttttttattatgatcaatttaaaaatgctacacgttccctactcaaaggttctcaaaaaatatatataactgtgcatttacgtttattcattataaaatttacgaaaaagtagatccattgagatatgtatttcggtctccacaaggctagcaatgacgtaaaatatttttgtttaaaattaaaacaggacaatgtgcaaagtgtacttttttgttgttctttttcaaaaagaaaaaaacaaagtgcaaatacaatataatttttttatatattaataaaaataaaataataaatatcttaccccaaaatctatcttgtaatctactatttatccattgcaatgtttttcttctccacacttatcgttattaacttggtaagattgaaataattataggctctctacaaagtatattcaaattaatctatactacactcccttattctgtatcaaacaaaatactaaagctgatgttgttttgctatatatgccattaatattatggtttcttggtcctaaaacaagcataataaaaaggggaattcatatggaaaattcatccattaaaagtgaaagtattcacgttttgttgtacatgttaagtattactggatagttggagtcaacttacaagatatcaaggatacctgaaatcagacataactacactcatcctctttcctataatgagagtattgactatcaggttgtcttccacagctcccctctatgattcatatagataataatagtgtttctatttattaaaccttctataggaatactctctatctccttatcttgtaaatattccatcaaatgtaaactgattgtgaaaacagaatcataaaagggagatacagtggcgttcccaaatttcgatatcaggcactaagaatgaagtcctagcaatcagtgcttccattcacaactgctacatatgtccgaaaggcactagtactgatggaaatctccactttcttccatatagtaatgtgcgtttagtatggggcttctcttatatataaaatcaaaacttcttttcttttttccttttttcttttttttctgtttttaaacaattaatttacgttcgaaaaaactataaaaaattgttgagaaaagcagaaccaaactacaatagtgtattatttactcttggacaagccattatataaatctcaatgagtgtttacttaaacaatacaatgaaaagaagtctggtattgtttattatttcaacgaattttcaacctacttaaatataataattattgcacttctatttcaaatatcgtttattgaaaatataataacttaatataatagaactatgtattttcttcaaaactaaaaatttttaacatactaaaactcaaaaaccatagttttattatgtgttgttgaccacctcttcgagcaatcgaattattttcctttcaaacctactctgattcaacattctgacaacaatataactctctatgcgagagatcaaaatgtgatctcgatttgttagccagaaagcctattaaaaaataagcctgattatggtgatgatattaaatttttcttttctttttgcaaaaccaagaagtaatatatatactttcattcatttgtaaaaatgatactacttgagtggctctcgtatattgtttctcatattcaagtgtagtcactacgttttcttgcgcaatcctatctgcttatattcccagttggacaaataaccatagcatactctcatttatacctaaatattaatattcctgaattctcaacatattaaaaatataaaaaaattccattagataaagaataataaaaaaaatgatcttaaataaaagaatactgttagggatatctatcttatttacatttgcaggttttatattcgtttgtattgcaacagcaggttccacatctaattataaaccaattacaaatgtgtattttggtgatgcatctatttcccatatcaatgtttccaaagtcttgcctgtttttactccagtactagaagttttgggagctgctcttttagcaccaggtgttgacggagatttcgtgttttctactatgagaaacatttctcacacttctgtattattgccatttttgactcttctgattaactgtgaaaatacaacaactgctttaagttctctaattaatctaactcctttagtcttaactagccaaactggtaatactaagactgagttagaagatcttaacaatttgttggctgtgtccaaaaatagcaatgagactgttgactatttacaaactttattaaatgaagttttgagcaacagttctactcaaatggaggaattaaaaaatactgcgtttactttattacaggattcttctgatcctgctaataccactggtagtttagtgactttatctaatctaacccttactgatatcattccactacaaccagcttttaaattattacagaattctaataatgctactgcatcatttttggacctgataactttaatgaatgcaactattccaacgaacttggcagaaacattgtttaccacattacaacgtgctattaactccggttcaaatatcactaatgttcttacaagtttatcttctatgtcatccaatttcgcagcatctggattagctctagaaaatattttaacttctgctaagaacgccaataacactttgggttatctaaattctattttggaagctaacctaacatcctctgttactgccaaaaaagtattatccaccattacagatttgtacaatgatgccaaaaataagactcttttattaggttctttgactagtttggtatctgctgttggtaatactaatgccactaatgaattaaccaccatgtacaatatcttagacaacagcaataatgcggccagtaacgtcgataatttaaaaagtttacaaagtattatactcactgatacttcaaataaccggtatatcccatacttatttgatatcttacgtacttccaaggatccagcaggtagttttggtgctttattgaatgttacatcatatgccttctcgaatcttgcagaattcactcccttactatctctattgagaaatgcctctactgcatctattccaactaatgaagaactatataatattaccccattggttattaaagaattgaatatcccatctgcatttagactatcaattttcacgttatgctatctcaatgacaaagatgaagtaacatactgttccaaatctcacgccgttcaaaacttggatttcagaaatattatgtataaagcattaattggatctgattttgaaccttacctacgagcattaaacatcaccgctaatgatttatacttagaaggtcatttattgaaaaaacaacatatgtatgccccagctatcaaggccgtactatccttcaatattttattcattatttcctcattctttatcttatgcttctttatctacatgtttatcaagcataatgaatttgctttacctcatttgggttggtttggattattacttttatctttatgctgttcattattctctgggttatctgctactattgttgcatgcatggtcacaattattaagtctggtacttataaagataagtttaacgttgtttatactacaggaggtgcatactatggtctttcatggtgtgcattttccatttcttttatcacttcaatgattgtcggtctaatgtggctaggtcattggagaggtattcatcatggtgcattaccatttgttgacaaggaagaggtcatcatggaagcttccactgagactgcatctgacagttcctctaaagtcagtaaagatcacgtaataacttctgaacaaaaagtctaataaacaaaaaaaaaacgtaaccaacaaagcaacactatttatcaatagtggaaataacagatacacacacatatacatatatacatctattataatgcagagtattttattaagggacgaaacaaactctattaacatatatgtaacataaagctataacgacttgattcatgaatatatatatgtatttgtatgtgtatatatgtttacgaataaaaaaagaaaaaaaaacaagataatattatcaacggttaattaatatatgagtggtttcttttcaataggttctgacatgtaaataacttgtggacgtctagaagatctgacagaacaccaagttataaaactgaataatgcagccagcacaccaccccatataatacccaaataaacatgaccatagttcaatttgataccataggaatcattatcgtccaaaattctgtaaatgataattaatgcagcaacacatgaacttgcactgaccaataaagaagcaaacgagaaaaatgatataaagatgccgacagcttgaacaaacctgaaatgtataacccatctaatgatacagactaatgtatttaagaaagacaaaacgatacctatcaacagcgtgataaacatacatttaattagaccgttgaaataggacttcttattttgaatatcttcgggtaaaaggattgaggcagagtcaatggcttccaatatcgaattattctctatgttatcatacaacaattcttttaaattgaatttttggatgcccttaggagaagtacaactggcaattgttttgtttgttgtctctatacaatacgaccaaagtccaaggtttatatagcctggaagactgatatcagatgcggacgctattgttgctgttgatattactgaacgtattgagatacctgtcaggtcaatttgtgatgtatagatatggtttattggataataattctttgttgaacctgcacaaccaataattgataaaataaatgcagaaaaggaaaaaaatgctgttaaaaataaggcaaatgcgtttgacatctttttgttttttgttttttttttcagcctatcttgcaatattggatagaatgaaatagaatgatacaaaagccagaatgttaagaattgaaaatatgtagtaatacaaaacaaatgaaaaatgtataattaaagactaatgaaaggacacagctctttttagataaactggtgaatgataatagtaataataatagtctttgatatgtagtacggttatgtatatatcaccgttattatatttaaaatttaataatacagagagcgtacctatcagcaaatcaacgcaatgatataactaactgactaactaacaaactatccaaacggatcaaaaagagactttgaggtatctgaaaaaaaaaaaaagaaaaaaaaaaacgaaatacaagagtatctagctgagttcaacagatcatatcatataaatattacagaagagaagcaagagacgacaatgaaaagatataataaacaaaaaaaaaacagatatccctggcgtcataagccataccgcatacacctacgtatataaatgaaaagagatatgtagacatatgtctatgtagacatacaaatatgtatatgtactagccatgttttttttttatctagaatctatttttaactaatccaaaagacgcaatatattactgataacaacaacagtaatgatgatagaaatgctaacaagttattcaaaaaactcactaaaaaattaaaatggtaggcttggctatgtaaccaaatacggaaaaattcctcaaactctactgcgaaagccctcgcgtctctgtgtctagcccactcaaggaaaagaagaaataaacccaaaaagagataaaaaaagaaattatttcagattttttcctttttctttttccacctctcccctaagactaaaatccgaccagaaaaagtttccattttaggtaaagcccaagtcacaaaaaaaaaaaaacaaaaaactatataggaaaggcttgttgcttggtaaaaaaaaagaaaaacgtttcttacttccttactttttgtttctttttgctagtttttgtttcgtttttaggcttttttcgtttgtagtgattttccatcttttcacaaccacccatacactcacacacgtgactatatccttctaccataacttggctagagttcgattctctttagtatctattttagtcttttctttttttatgtgtaagaatcctatttttaaaagagagaatgatttgcagtttgtgtctatttaggtgggtgaatacataagcatacatcctttcatagtttatttgcataatttcttattcgtaagatcacatttctattcgccacacttactaacttctacaagaataaaaaaatataatcaaatatatatatttttatatatgactcataccgcttatcaaatccatcttatgtattattaaatgattttgctcagatgacatattttcaatctgttcaaataaaaaattctggtagacctatcttatcaaacgatgaacatgatataataattaatgattctgtcggtttgtacaaagataatcaaagaattaaagataaacaaaatggtagaatttttttaactaataaaagattaatttatgtagataatcttttgcctttaaattcttctgtatcactaaatttaaatgatatcgattcaattgattaccagtcccgttttctaaaaagatcttctagattaataatatttctaatatcaaataaaaataatcaagttcataaccaatctaaccttctcaattgttcatcatcctcatttctaccttctttctcttcccctaattcaattttttctactactgaatggatatgtcccatatgttcagccactaatgtatctgatggtaaaattacattggcttcaactaattttcctgtatgtaataattgtggtgtacaaatggattacaatatgacaaaggattcagtaaaatatcatattgataataccactcttactactgataccaataaacacaaaaatgggttgtcttgtcctaaatgcacctttcttaatcattcatcaatgaaatattgtgagatgtgtgatacaaaattacctcaaagcaaaaatataatatcttcttcttcttcctcaaataataaccataataataatagcatagatgtacaatcatcagatatgcccaaatatattcaaattagttttagaaaaactgatgggtctttattttttgaagctactaaaaaggctcttaatgatttaaaactcgataatggcacttttaatcaaaatttagcaagtgttaatggtataccagtcacacaaaaaaataacatttcaaattccacttttactactttcactactactcctatgcttagtagtaatattgaatttatgggaattaatggattagaaagatataaggagactcaactattaaataatgatattcttttcaataatgcactacaagatttaaataacttaatgtcactagcgaactcaattgaaaatttatatagagcacaagacaaaaatttatcaaataaccatatttctaataaaaatattattgagactaatttaattatagatcgtgaaaaatttctaaaccaagattcctttcttaatgaattatcaagagaaatttatgattttgctatgctagaattcaaagataatgaaattaataataatgtgttaattccactcatagatttctatgcaatgtacaataaagcaatgaggataggaacaggcttgatatccccacaagaattgaaagaggcatgccaaagattctctaaattaggtttaaatgatttaaaactaattactttaaataaaagaatcttatgtttagccaccaataattcatttgattttattaagaagcaaattttggaacttttatcaaaaaatccaggtttagatattttaaaactcacacaacttttaaatgatatggcagatcaacataaatctaaattagacaatacatctggttctaataacaataagaataatcaaaattctgtttggacagtttctattatagaagaaatccttcaatcctgcattaataatggtattctagtcattgacgaagatttaagtggggtatactattatacaaaccgtttttaaagcatatattaaacatatatcttactagcattttcttttcttttcttttttcttaatgatatgaataattttaatattgtcttaatatatacgtacacccacacacacatatatatacatatatatatatatatattattttctttattgtattaggaattatcaaccgtttcatttacatcattataactactgttcagtaaaacaaagaggaaaaagaaatctatttatatatatatatctatatatatctatatgttggcttaataattaatcaatgatatcctctacttaataactcttgttctaaattgttccaaaaataacgaacaatttctacatccttaaatcttctatttctatccagctcaaccctttcaacgttccactgttgaacatgttgtggtatgacatcaccattgaaataaaaataataacctttacaatgctgaaataattcttgcggtgtattccattgataattattaaactgccatatatgacctgtggtaaaaactgctactaccctatcccaatattctggtttagtaaacattctagtgttattaactacaagaaacctgatcgttttatttatcttgtcaaatttcttttcaatggtaactaaatcgtctcttaaggatgaagacaactcacgtggattaatatatttacattcttgtaaaaatggtttaatattagatatagtaataattgatgatgcagctgatggtatcaaaataattggatctttatgttgaatatattttttacgcgaattcgaagacacattctttgaaatatgaccatggcgacctgctttattacgtaatgaagatttaatgttttgaaccaatttcaactccacatctttaatcaaataaccaaaatcaatagattttgtacctcttaaccctgaattgtgatctaataatcgtctttcatgttttaatacttcatttaataacaaatctgatttaatatcatcggttatatcctctttttccaaattatcttccaaagattgttctgttttgacaccagaggatgggttattcccagactctacaataactttatgtaaattattattattattatcatcatcatctttggttctatcagtattaatcttatcagctttcgtctcatcggcattagcattaatatcaccattagtagtggatgataagtactgtgatgtttcaagttgaccacttaaccatccattcaagtcatttctttgaaggaaggaaacattaattaaattcttattttgacaatctgccaaatagtcggtactgctggaatctttatgtaaaaaacaatgaatcacaactcgtaactccatattgtttccatctattgaaaagttagtttctttagataaatcaaatttttccaatttaccataatctatactatcatcagcattattattatcattatcattcttaactaaaacggcatatttagccttagtaatatcatcgacaacttcattgttttcatctagaagttttattttttcatttttaattaaatgattccttaacacattcaaaatgttttcaatcattatatattcgtcttatatgtatatattttataatgtagcaagttataaagtaaatatttattaatataaatattaagggttctacctttttttattattattgttatttttacattacttttgttgtcagtgaatccatttaaagaagacacctgtaacaactccagactacctttcctctttctattcttcataatctctttcaacaactttgcaaaatctcaatcataacagcataatgttcatcaacctctaccgaatcttagtgatcaagaaatttttggtaagtaaattcccaaaagaaatttttcaaccccaaaaaatgagggtaacttttaaaaaaatattcttccttttggaaaatgaatctgggcggtaaaaatcaaatgttaaaaactaatataagattgatacaatctttatattgatcacttatttgcctataaactcaaactaaaggtatcatcaaagtaaatggaccagtgatcaaaaaaaaaaaaattacacagggtgccatataatacagtataatcaaataaatgcgttaatttagtggattacataatttctatattttttttctttaatttgcactaaaatttacttaagtattactgattatacatatacatatatatatacaataaaaatggctaagaagggaaaaaaatcatccacaccagtttctactaaaaaagaggacttaaatgctaaaaagaagggtaaaaaatccaaaaattcccacgatgaagagtctattgattcaaaagcaatacaacgcaccaaacaacaagcacaaagagccaaggtcacttcttcttccagttggactggaaaattaccacatattttattacatgaattttgtcaaaaaaggaagtggggtaaagtggaatatgatatgaaaaagatcggtgatagaggtatgctagctattgctacattatcctatacagatccaaagactaaagaattgttgactattagaatgaatgatccaacttatgataaagtaaaacgggaaggtgttttaactccacaagagacaactaatgaggcaagacattatgctgctacagttgcactttgccgtctcgcatataatacaaatttacaaatgatgttacctccaaaccatagacaaatatggtatacattagatgattatagaaaaaaattgataagtgaaggtaatacatatcacgctaatcgtatatttaattctgaaccatttgttatgttgttggaagatagaaaaatggaacaacaaagggcaagggaaagagaagcgaaaaataatcaacagatgaaggaacagaagactcctatctttatatcatcgacaagtttagttaagaatgccaataccgataattataaagataaaacaacaaaaactgttcctaaaaaagatggaaaaattacaaaagtttccaccaataataagaatttatatgaaggcataaatcaaggtatcattagatttccaaaaaaagtatgggaaaaggctacttttgttgatttagatgaatcaactagacagttaattgaattgtccttgaagggcataattgattggaattctgctcgtaagttagataacacatcaggtcaagttaaggaatcggcctttaaggagaaactgctttcttttaatttcagagaaacacatgtgaatgaggctatgaactataaggacccgctttcattcttattatttaatctaccggaagatgatttacctttgttttttcataaacgtaaggaggattcaaaaaataagatcgagatatcatccctacaattaactacaagaatgagtgttgaaagattatgtgagtgtggtgcatctgaagatgaagttttatatgctctagatcaatgtggaaaaaatgagaatgaagcagcacgtatactaacagaatccttaattgataatcaacaattttgtattccaaaacctgacaaaataagtgagaaagaatccattgaatgctggaatcaggaacttgaaagtttacagagtatatatggtgattcaatcgagaatgtggtttctaattctagttacacaattgtattagatccaactttaaaattaagagttaaagtttataggtccaataattatccaaattctttaccaggcattattgtatctacatttgataaaactctgaaattaccaaactatattaaaaaacaaatattgactaaattattagaatatattctagaacacaattttgttggtgatatgtgtatttttactatttttgaatggttgcaagaaaacgtcaaaaatattattaacaacccaggaccattattatccgaagaatatctttctaacgcccctgataaagataaggtacatttagtcaataataataaaaaactgttaacgaaccgaacttccatcaatacccatttaaatcaagaacaactaaagcacgccaaaaatgaatatactttaagaatacaattgaaagaatttaaagaaatgcagctaatcagaagtcaattacctgcttgggaaatgcaggataccattgttaaattagtagaacagaatgatgtagtattgatcacaggtgaaacaggttcaggaaaatccactcaagttgtccaattcttacttgattcgctaatgaatagtttaaaaaatactaatataatttgtactcaacctagaagaatctccgcaattggtttggcagagcgtgtagcagatgaacgctgtgtcaaatgtggtgatgaagtagggtatattattagaggtgtcaacaaaactaaactagggacaagaattaaattcatgactactggtgtgttggttagaattttacagtctgataaatctctattaaacaactgcattgtagttattgatgaagtacatgaacggtccttagatactgacttggtcgtaactttattaaaaaatttactaggaaagataccaggattaaagattgttctgatgagtgccacagttaatgttaatcttttcaaaaactactttcctaatctaaactcttgccatatcaaaggtagaacatttcctattaaagattattatttggatgatattattaatgaattaaattttactatcagaaaacctccaagtaacaaaattcaaggacactacaatgctattaatgatgatgacattaatgatgactcttcttcccttgatagtttacgtgttcaacctgatccagattcatattatttcagatctggtaagatcaattatgatttactatgtcaagtaacagagcatgtggataaaaaattacaacttgacggtaacaatggatcaatcatcatatttttacctggtattgcagaaattgataaatgttgtaaaatgctaagggatattaactctgttaacgattttgttgttcttcctttacattctgctttatcacctgaagatcaaaaaaaagtatttaagaggtatccaaacaaaagaaaaatcgttgtatcaactaatattgctgaaacatccataactattgatgactgtgttgccacaatcgatacaggaagggccaagacgatgttttataatcctcaagataacactacaagattaatcgaatcttttatctcaaaagcagaagttaaacaaagaagaggccgtgctggtagagtaagagaagggttatcatataaattattctcaaaaaaattatatgaggaagatatggtagagatgccaacacctgaaattaaacgtgtggcactagattcgttatatttatctgttaaggctatgggtattaaaaacgtcactaaatttttagcctcaggtttggaatgcccaccattagaggcccttaagaaagcagaaacaatgctttcaactatagggttattaaattcggaagacttttctttaactgaattgggtcgattcatatcactaatgcctgtgatggatagtaaacatgggaaattattgatttacagcatattgtttggtgttacagatataggtgtactgattacatcattattgagtattggaggattaccatttgttaatggtatagaaaataaagaaaaaatcagaaaaattctttcacaaaataaaaacaaaggtgatatattagcttcagtagatataattcagaaatatcttgaaatcaatgacaaaacaaagaaacgtcaatttataaaagacaactatttatcttttaataaaattaacgaaattttatcatcacaagcacaatattactcaattttaaaagatattgggtttttaccttttaattatcaaccaaatgtcaaatttagagaattcaatagaaatcaagataaaacagaattaattgaagccatattaacaggtgcatattatcctcatgtagcaagactggaactaccagatacgaaatacctatctacatcatctggtgcaattgaaaaggatcctgaagcaaaattaatcaaatattggataagaaatgaagaatatgtagataaattgctcaatttaaataaaaataatgataatcagaatgatagcaccagtaatgcaaatatgcctttaccctgtacaagagcttttatccatccatcatcgattttattccattctaattcaatgaacattgatgaaattaaatctttagaggatatggctagccttaacatcaatgaaaaatacagcaataacaataataaccctctcttaaaatttccatttattttgtacaatacatcatcttttaccaacaaattatatttaagagacatcactccaacttcaacattatcattattattattcggtggaccaattcaatatgatattaatgacaataatcattctccgggtattattgtagataattggttgccaattagaacctggtgtaaaaatgcggtattaattaaacaattaagaattcaattggataaagcaattaaaacaaaattagaaaatccaagttacattaatgataacattaatttagacgattcgaacttaagttcctcagataaagtattaaaggtagtagaaacaataatttcttcggaagtttaaaaaacaacattaacaagataatcaatcatattcacgtatatatgtacatacagagatatatatatgtataagtatgtagaaaataatatctatacatcatattgtaaagtcaaactcttcgccacttcagtggtctcaatagcatttttaaattcttcaaagcttaatttcccatcgttatctttgtcattttctactatagttctatcaacaatttgttgtaattgatcatcgtctagattatttcctaccataatcttcaatacaatgaacaattcaccattcgatatataaccatctttatcgatatcatagatcttaaatgcaaaattaagcttttcatctttactaccacggccagagaatattgataaccccgtaataaattcttggaaatccacatccccagagttatcagtatcgaacacttccattatacgagtagccaagggatttgaagaaacaccaggaatagacataaattcgtttttgtctattgaaccagatgaatccctgtctaatttcataaatcttttccttaacctttctatctcatcccgatcaaaatttgtatcttctaataagtcatctacgatcttggaggtagtcccacccatcttaaagtaatgtaaagtgaattagaataaaataaagccaattaataccaatatatatgtgcatttatgcttgtggataaatatatgataacgttacacatacagttttcagctatccatagagtataaacctattcaaggtaattctattcttatatatatatatataattaaaaaattgtaaaatgatttttataaaacaaggttccttcttgttattaagggcttttctgtacttctgagtttttacaaacatatccaactactaaaattagggtatttgagtaaaagtttgtcttcattctgtttttttctctttttctagcagtcgcataaatctattcttaactgttgaaaaagtaaggaagaagaaatttgaagaagttgaaaatacagagaacaagagtagaagtgtgattagaaggagagttgaaactgcatattcatctgcattgttacataattaatctattagttatcactctaaacacacacccacccacacatctgttgaaactcatagaaaaaatacaaggaacagatggcagataacacaccattagatttattgaaattaaacttggatgagaaaatccatgtcaaattacgtggagcccgtacaatgacaggaactttacaagcattcgattcacactgtaatattgtccttagcgacgccatagagataatatacaatttgacagacgacggaacgttagagagcaatgagaggaaatctgagatggtgtttattcgtggcgattcagtgactttgataactactccagaagaagactgagctagaaaagggagaataaaacaaagtaataagcaatatatatatgtttataacttaacatttctcgaaagtatagagatatgattcatttaatgctaacatatatatagacacaccattctttctccttcaacatttctatgcatatatgtactgatacataaatatacatacatacataaacgcacacacacacacacatacacacacatatatatatatatatatatattaaaatagtataaattttattatagcaaaattaaactctataatatttacatacatatatttattttttttgttatgtatatttcaaatgatttattcatttatttatcttagttttttttttctcttttctctttttcttcttcttcttatgcccgcaattcattgattgctctttccatagcatcaacaccttttaacaaatcttcctttgagatgaccaagggtggtgccagtctaatgatatgatcgtgtgtaggtttagccaggacaccatgctccttcatctttaaacaaagctcccatgcagtatggccattgaacttacttggatcgatgacaattgcagtgagtaagcccaacccacggacctcggagatgcaaccacctgagatatcttgtaacctgagcagttggtctttcaaaatgatacccaactcctcggctctctggactagattttctttcttgacgacttccaaggcggcgatggcaacgctagaagctaatggattaccaccgaaggtagagccatgagaacctggtgtaaaacatagcatgatttcacgagaggataaaacggcggacacaggcagtacaccaccggacaaagctttacccagtaataagatatctggcttaacattgaagtgttcagaacaaagcagtttacctgttctacctatgccagtctgaatctcatcaacaattagcagggaattatattttttgcaaagctttgatacatttgagagataatcttttggtgggacgacgatgcctgcttccccctggatgggttccaagatgatagcggcgatattgtctgcatggttttcaaatgccaattccaaatcttcaatgacaccgtatctaatagttaacttcccaacattttccttagaatcaaagttagaatcagggttggtggagttagagtgatgacgaagagaggaagagatattgtttaagaatggaccaaaatttttcttggagtcgacaaagtcggtagacaaggagatagcgccaaaggttctgccgtgaaaattaccttgagcacccagaatgatagctttatcctgggggatccccttgacttcgtatccccaacgcctagccaatttcaaagctgtttctactgcttctgcacctgtattcattggcaagaccatgtcatattggaaatattcggtgatatatttagcgaatttcgcaaatgtgtcattggagaaggctcttgaggaaagagtcaacagttttgactgttcgattaaagcgttgataatatctggatggcaatggccttggttgacggccgagtaagcagagagaaaatccaaatattctttaccttcggggtcccatacgtgtgctcctctggctttatggaatacgacaggtaaaggatgataattgtgagcagaatattctctttcgtattggataacttgttcagaagataaagtagtcatggtggaaaataaaaagaaacaaaaaacaaagaaaaattgaggtaaataaataaataaataaataaaaaagtaagtaagtaagttgtgaatggtatttatctcttactgttgtaggttgtactatgataactactatactatatacaagaataagagaaacacagagtcaagccaaaagaaaaaagaacaagaacaagaacaagaatgaaaaaaaaaataaaaaaaacacagataatttgtatgcgtatttcttctaccttcaacgagtttatatatgttcaaattccataaccactgaagaccataactacttctgttgtacgtagtttctttcctcccctcccatactacgcttattatcgtagcacccactactcctgtgtccaatattaaaaaaagcaataggacacagagcctttttatacaattctcggagtccttaccccttaactgtcacaacgaacaaaagagaaacaaaaaaaagacagaggacaaaacagcgtctgtcatttaaaaaagaggaaacctccgttaagagaagtcagcagcgaggacaaactctgaattttgtgaagtggtgatgggtgtatgggtgttctctacaattaaatgacacaaatgaataaacaaacaaacaaacaaacgcaatgtaatattgatcaaacaacaagaaacacaaaccatttgttgttctctcttgttcgattttattttgatcggaggctgttttgatatatatgctgagataaaagagataagataagataagataagataaagaaatattgggtcggcacgtgcaacacacaccaaccgttcccgtattgaatgatattgtgttctctttgttgttatctgcgtattttattttgtttctttttttttttatttttgtttttttcgcatttgatttagtcagccatccgttgccgtggaaaccaattaactgtatatatttctcatcatcattcgaacaatcgaatctaccatcttttttttgtattttctatacttttttgttgtttttttctttttagcttatatatatgtttatttatttattttatattcttatttctaattctcacctctttttccatttctcttatatttctttctttctttattcaatattctaaccattcactaaatacataaacttatccatatctatagataccacacacttttttttttcttttcttttcttttcttttcttttcttctatttgcttttttttttttatatatatataagttatatcatgcaaagaatacaactgccatcaaatagtttacaacaacaatataagagacaagcatcattcggtgtgagtaaccatgataatataacagaatccaacaacaacaacaacaacaacaacaataataataataatgataatgaaagtaccacaaactcacctcactactatttaaatgaattacaaactgttggaatgagaatcagacaatgtgttgatcaaggctttaacttactaaatagagagaaatcagatttaagtaatgcctcgttaaatactaatgataatgtcaaaacgtacgctggattcatagttccacaatataatcctacttgtacatctacactatatttaaatgatataattaataataatagtaataacagtaatggtaataatcagcaacagttcaatagtataaacaatccctataataataatgataatgatgaaaatgaaaatgaaaatgaaatcatttatctgaatgggaaaagaaaatataattaatatagatatagatatagatatagatattgtatattatatattatatgttgtataatatgaaattaaaaggtctgctgcactttaatctcgaaatactttttcgtctagaaaagaaaaaaaaaaagattatcacttgattagggtttgaatataattcaaagaaaaattattaatgaatttctcttttttttttttttttttttttttttttttttatttttatttattctattttttattgcttcgaacgattttctcgatccttttttttttttttcgttttggtccctttgtcttttaagtaaatggtgagaagtgtaaggaaatttaacttgatattttttatattatcatcaatctatatcattatcgctactactactactactgttgatgttattaatactgttatcgtctatattgaattaataatactacaaagtaatataatatttgtttgtggatatcttgatctaattcttatacatagatccatgtatacacacatatttatattaatttattcaaaacaataccattatcctaagtctcctagtttcctctttctatttattcaatttcattcctctaattgattatcccttccccttggttttatttatttatttatttatttattttttatcatttatcctttcaaatgggtaatactgattcaaagttacaatctgtatatcattcacatttccaaagattggctacccccacaaataacaatgatagtagcaatgataatgataatatcatcccactgttcaatgataacataaacctatcctttattctttctttattgtttcaaaataataataacaaaaatcatggtactgacgataatgataatgataatgataatgataataatgacaatctattaaattattctgtatacaataaatacccaatcttcaatcaattttttttggatttttacaatgagaacaataataatgatatcgaatcctttcacattaataaacagatattgactcttatcattaatagcaattataaaaactatgaaaatctactaagatttgttatattacaatttattttctattcgaaatcagtgattttaattaacaacagtaatagcaccaagaatagcaataacataccttattattgtccgaagaaattgatacagaatttattattgtctattagattgttaatcaatttgttaccaacctattattcttatcaaaacgatatctctaataataacttcctcatatacgataccgattttatatgggataataaatccttggataacatatttaatataaaaaataatttcactaatcaacaacagaatttaaatgaactactcgaacctaattgttccttgggtcagttgatcattgaaaatttattaaatttatcattcattgatggattcactgtttttaatgataaaaataaaactaatcaaactaataataataataataataataataataataataatgataaagatatcaatctggtttgggaaaatggattatttactaaaaatacctttttattaaaacaatatccaagactggatttgaatagagtatactgtttggaattatggctgactttgttttcaatagacttatacaaaactgacaaccattcagacctcaatagtcctgacaacaagaccagcaataattttattgaatttttattgaagctgagatcaaataaactcaatcttctgtttctttcaattattaatcttctatcaatatatggaaacaattttaaatcaaatttgattcaaaattcatattatacaaacaacaacaactattatctattgaagaaaatcgatgattcgattgtaccaaacagcaaaaaaattttattagatttaaaagcaaaacttatcctattaggtctacaattcattaatgtcattttatattatattacaataaataatatccaacattcatccatcgagatatttttgcaaaaatttatgcaaagagaatttgatttcaagttattattgacctcctttattaaaatttttaaacatccaattgataaatgtatcgaaatcgaattaaatccattgagattccataatgatctaacctcatcactttccagcccgtcaaataatgtcagtaattctacttccactctacaagcccaatcgtattcctcttcctcgtcctctgtttcatcatctacatctgcatctaatcaagtaaatagatcaacaagtaatgattcaagtccaattaaaactaatctacctgacatacccgatctattaattcaattcatgctatttattaaatcttttattaatattaattctaatttcaaaaaatactttattgagaaatttgccaataaatttgttatttttaatatatattatatcaaatattatagtaatattaattgctataattcttcattaattccactatgttacacgttgatattaacattattaaatgaaaaattgactctacataaattgctacaaacatttacaatcaattattatacaaataaattacccaatttttataaattaccaaatctagaattaagtaacattgagtcattaacttatagagattttatcattatccatttatcgaattataacattaaattgattaaacaaaacttaataccaaataatttaaatttcgaaatactctataatatattaccaattggtaacaatattaataatattggattaaacgaattacctaaatcggctatattacattcgaatccgaattcatattctaatccatcctcgaatgatacattatcatacaatgcaattttgtcattattaaacctatttaataagatgtcaataaaatcttatctttcatcgtatagcaacaacgagatttactatgtaagtggttcacaatactttggttcaatccaatcattatcattaccttcatggaaactggatcaattggctttaatgatcagaacaatcttaaaatttatttcattccactatgatgaatctaaaaatttattgtttttattatgtaaatatcaaaatcttttgtttcaagttaaggattctctacaatttattgataaaattttgtttagcaatccatcaaaactaaatgattatgtttttaataatctaaaaaatattaaaactttgcaaaagatcgaatatatgactcaattaaattacaaggacaacatatataatagtattaacatgagcataaataatgcaaatggttattccaatttatcaaatgatcctattaatatggagaaattatcagtaaatcacccaacttccctagttttcaataagattacatctgacacagattcaaaggaaaagacagcaaacaacgacacaatgttaaattctgataataataataagaaaaaaaataagatccttgagcactctgattataactatgatctttattttgaaaataaatttatttatactatttttcaaacacaatggccttggggtttaaatgagaatcataaattaaagttatcaaaaagtgtatcgattgatacgacaaaatctgcattttggacaggtcattcagatttcaaattgttagctagaattattaagttgatagtgatggaattcccagaaattttgaatacaaaaaaaaattcagagtttagtatcctgatgaaaaaactcaatgtctttaaaccaaaattatatgaaaaattgaaagatcatttgccaatatatttatcacaccctaaattttattcaggcattcaatttttggataataataagatatgttctaaatggttatacaaactttgttggacaaatattttcaatgctaactcgtattattaccaatttgatccagaacttgatagtgtatatcgttccaatgttggaacaaagccacagacaataattttacaaaacaagagattaaatggtgttatgtctataaatggtaacacaacgagtagacccggcagtttagtatcttcagcatcccctatactacctactttggaaaggtggtcttctaataactcgacactatcaagaacacagagtaataatagttcaatacttagtttttttactcatgataataataattctattactacggctaactcaccaacctccacaagtaatgatggccaatttgaaggcaaaaagtcaattcacaattcatcaaataataaaaatttgaatggtaataacaatgatgctaataacactaataattcttaccctttttcatcttctacttcatcttcttcaaatttttttaaattttcttggagtcatttccacaaaggaaacgatataaatggtcttactattcaagaggaaagtgctgttgcgaatagtaatcataaagatatggtagatgacgatgatgaagagatacaaaatttacacacaaagacctataactacccaattgatttatataagatttctgacgatgaggaactcttaaaagataatatatgggtcaatactaaagttggattatttgttttgaaaaaagataagaaagaagaactaactttctttaatgtaacatcgtctttattaaaaaaattcaagttttcaaacaattcaaacgactcagactgtaatgaaaataacggggtcttgaataatgatccttcttcaatcaagtctactccaagtactacctatattaataacaattataatagtaacgatagtaccccgttaacaagacctattagaagatatttctaagtgatagaattgtttgcaggactttatatctacattattagaaaatgaaaaaaaaaagacaacgcatagtgtatagaaagtctaagtctctataacatattacaaagtgcttttatgtctacaatgtctcatatccttatgttagaatacttttattggagacattaattaattaataattaaattgaaagaaaatgcaatgatataatcatacaagtcatccgcagcaatataataatctatctttttttatagaatatttctgttaatagactcatgtatttatatacgtatatggataaatatatatcaccatctaaaaaacaacaactatctaatatcttcttctcccttttttttgaaccatttcaaacccatcatcgtcaataattggttcatatcttgaagctggttcaatatggtcttgttctacctcaacattcatatcttcatcttcttcactatcactaattactttgttgatttcaacatatctttccttattagcacctgttttttgcctttctagccatttggtatataactcttctactctactatagtttaattgcctacattcatcatataatatgatcatgttatttgcaattggttgagcagatccatcgtcaacatgggtgtcaaattcgtccaacattgcatacaatagggtctcttcaagtaatggagaatcaactgctttattatttttaaatagatccacgatgataccggttatccaatctcttttttctgcagattcaataccaccccattgatttataactgcaatatctaatgcatcccaactatatactagcattgatatacctaattcgaatctggcctgttgttttggatctgaaaacattaagcttggttttcctgattctgattctaccattaaatagtcatcgtattctgacatactgtttcttctttaatatattatatgtaattttcttaacaactttgaattgataaccaaaccaccctgaactcacttctcttttaaacctggatttgttctttgctacttaatttaccccaaatgcgtcaactgaataaaattcctattagctaacaaatatgctgtattcctcctctatataagctctccttatgattttatgctcatctcatcgcatctcagaggaaactttcttattgaaacataaaatttttcattttctcgactaaattgaatttaaaattgatttaaaaggcaagttgaaaaaaaataaaaataaaaagaccgaaaatgtaaaactataaagacacaaaactggctaagacaaagtacattaaggttgtttagaacctttttacaataaaacatatgcagtcatattttgctattcaaattgacaaagttagaaagcagttgtttttgactacttttgttatatcgtaatatttttatttctaatcatccgtatatcattcatacaaaggaagatcggtagataattcaactattcattggattatgtaatgaagttggaggatgttctaaaacagcaggtagaaattgatgaattatttgtgtatttatgtaaattgcatgaaagattattagttagaaatgattctgataatgatgacgattctctacaagctatatcattaaataaagtccgtcatgatttaatcgtttgcttaaatgatttcaatacgttaaatgatatgttaatatcatttgatggtgctattaagcaagatattcgaatcctagaggaagctaagcttgaaattaatactttaaaacagaggaaaggtgaattgttaaaacaaagagatcagtgggttttaacttctaatagctcaaattttatagattcaaatattaccaagaataataatgatgttatgcaaattagaacatcctacagaaataaaattgatcaatatattggattagtagggatacagaatacaaccttgtttaatcactctggatttacaatccaaggaactgaaagactcaaagaatatgaagaggagatctcgttaactccaaaacaaacaattgactctttaagattactaaatgattgtcagtcggagcttcaaaaggagatcaaggtactgagagcattattaagtaatttagagaaggattcacaatttattataaatgaaaaacgacaactcacttatctcattgaataccaacgaaatcaaatagagaaacaattaattaatattgaaaatgaagcagttaaattgctaaataaatgtggttttttatttccaaaaaactctgaaacttcatcaccctttgcaccttcaaataatagttcgattagcaaaaagttattaaatttttggaatccaagagataatcatgatagtacaccagaggatacaaatatatatatggtgattgaccacagtgatgaattcatcgattcaaaaattaacacactgaaatatcaactaaaatccagaaagaaaaattctacaaatttattagttgacaaacagctatggcaagattgtgttaaaacattagaagacctggaggattctctagaaaagacattatctgatgtagataaaggttctaattcagttttgttaccaccttctgctctattatctatgattactaatgaaatcgattatttaaaaggttctttgaataatactaataatccaagactgaaaaatttgatccagcacgaaattgctaatctacagatagcctgtgacgaattgtctattaagtcaaatcatcaaaacaaaactgattctgaagaaataagaaagccgaatatatctatctcagatcattatatgagcaatttcatggattataatacaagaagcttaaaggcacctttaattataggtaagtcacccccaaagattggtgtttccaacgaaagcacgaataacattttcgatacattcactagcaaaaaaacgaagtgaaaataaataaataaataaataggaaatcaaccgaacataaaaaataggaccatttcttttattattaaaatttttattgtaagttctattgcggtgcaccttctctcatctgtttttttttttctttaaatcatgatttattgatcatgataaaatactggttctaatttacatccgtaaatgaatatcaacatatatatatagtttaatatatacttttccatattcaaatacgtcacaaatacaaaattgaatttttggttagtctatttataatctgtatttaaattttctaatgtcgttgaattggcttctttttgggaataaagggatttgaagaagaagactgcatacttcttctatttttaactttcggatttggtgaaggtcgtttaggtacatcatttaatttcatgtttatattggcatcacctgttattggaacaatttcaacactaactaaattttcctctatagtgctaccactattaccattcatttcttcagttagtgaaataggaggacttgtctctaaagaacttggaagaactggctctaatgtcaccaatctgctagatacagtagtttctttagagtcagttatatcatctgacaataccaattttggtttttttatttgaggaacatagtcatctggattataatcatcttcttcatcctcagaacgactattttttctagcattattatcatcttcattcttaatagacattgatttattgtttgaattttccttttcacgtggcctattattctttatgtcttgaattgatctatccaagatgttatctgggatatatacaacatcattcgaaaatgctatatgcctttctgattttttactcttctttttcttgtttttaaccattggtgtcctcaactcatcacttagtgtattaccaccgaatatagatgacttctttttggttcccgttgtaatgacatgaggattttcagacttatcactgactttctctttcttatccaactttgaatttttggatattcctccatcatctggatacctagatttgtctttacttttcttctttttcttcttctctttttccacctctttctccttcttcctctttttcttttctgcaccgctatcgtcaataatatgtttcttgatcttttctgcaccgctatcgtcaataatatgtttcttgatcttttcttctgtcttggattcctttggtatggacagttttttattagcaatataatcttccgtcttttttatacttctaaatgtagtttccaatgggtcataatggtcatgatcatcgacaacttgcttagatgaatctctttcataccttgaaatataagctggttttttattaaagtagcctggttcaatattctttacacaatgcctatcatgtgcatctttgataagatgattccataatttatttttcatcaatgatcgttcgtgtcctaaaatccataaactagttttagctctagtgaaagcaacattcatacgtctaaaatcttttaagaaacccacacttgatgtattttcatcagctctaacacaagaaataataataatttctttttcttgaccttgaaaaccatcgatagtattaaaatcaatatacttgttaatcatcccaccaaaatgttttataaattcactcctcatcttttgcatttgttctttatatggtgaaataacaccgattttaccaacaaaatcaacctttgaatcgtattttctaaataaaaaatctatcaattcaatcgcaacttttacctcttccatgttggtcaacgacatagtttttatatttctttcttgttgacctgttgcaatattgaaaaatttgtatggtgttaaaggagggcattcatgccatggacgtttattaatgatatccatgtttggcccatctgttaatttaccatcataaaactccagagatggaaaacggctaatttctggatgcattctatattggacattcagtaggaacggtttgctgtgttttgccattctaacgaataaagattgattatatttataattacttgctacaccagataaaactgtgggtggtaattggtttggatcaccaaccataatgcacctttgacaaccataacgaagaggaataatagaagaaagttcggtacattgacatgcttcatcgattattactgtgtcaaaccttattccaagcgtagctaatacgtcatgtgctgaaccagataaagtagaacatataatgtcactgccagcaagaatttgcatttgtatatttctcctatgtaattccctactacgatatgtaatagagtttttttcacgaatttcatcacgttgcttacctaaatcattaattattttactcaattcacgaatctttaactgtaacttggcaatatcgtcatttgacaaagtgctcgatgaagaaccgtcttcagcgtttagtttagctcttaactcttttcttttattaactacgtcattgaattgggaatccaattctggattttgagtatattcaaaacttttatcacctaattttctatctaccagttcttctaaagttaaatctttaattgctgcgttgacagcatcagatctaccaacacgaacaacatttggtttgtagagaacccctgagttgtccagcacaccacctttcaaacgtaaacaaatttcatctacagcagcattacttggtgcacaaattaaaagcttttgctttttaagcatttgttctaatgattgagttgaggcttcagaggtaggaactttaataatgttgctaggtttagtccttgctagagataaaaagtagccaataatacctaagattgttttagttttacctgtgccaggaggaccttggatcaaagaaaatccatcttttagaacactattaacaactgcttcagcttgagataagttcagtttataagtagattgaaccctttcaaattcttcaggcgatactactgagggtggtaaggtttttgccaacaatatttggttaactaattcgtagtattgtaaaccttctaaggtttgaaattctctttctactgtagtcatttgcataactttcgtagcaaaaatctctgcacgtaaagttaagaatttagagaacttatgattcctatggattcgtaaggttaaatctacagctttattcttggtaactttaattgagcgaactttggcaagacaagtatttaaggccgatttaaaatcatcattggataatttactgcctctttgataattaggtaaatatgccaaaacaatcaaatccgattcattaacaccactatcttgaagcatttgtttcgaaacagacgcatagacttcataaaaatcagacacagcagttctattacccacaacaatgctgaatggaatatgttcttctttgtctctagcagaacaaagaccctgccaacattctaatagtaataatggtttcataatctgtacatactcttcacttgatttaaattcatcacatatatcagaatacttttctgctccctcatctgttggatattcactgtttctattatagtcccattgtaagatagcttcgtaaagtggatttaaatcgatatttaatctctttctcatattttcttcatccatcttttttctttgagcaagagtgtctttcttaatgggtttcccattgatatccaaaatttcaatacctttgcttttactcttagtagatgcaaatagctctctggcagattcgatgtctgcctcagaatcactttcatcactactctcctcatgttttggtttgttggcgcttggtcttgtatggaatacagaagtgctgggaggatgaacaattcggttattaagtaattgtcttctagcctgctccattctagatagaggtttagcaattggttgtacatgtaatgatgggctatcagtgacttgaaattttccaaaagatgttattttcagctgtgtttgtttaggtcttccaatgatagatgatgaaagggcttttctttgaaggaaatctgctttactttcaacaggagtatatgaaggagatggactagataattgtagacttttttgtttttgtttatccttttctctgtgatattgctccgcctcttccacaacttgatttgtaatattgacattgaataatcttgttttagctaaaatttgagatgattgtgcttctgtcaacttatttgaaaacttcctatatttggacgcatatttggccattttttcaattaatatatcatcaaaattgatattcttttcctgggctagatccgcagtagccataattaatttaacacaagaatcaagtaattcctcatcacttaatcttaaccaatatagcatattatcaaaagtttttaaaatacaatcgaaaagttcaacattattttctccaaggatatcggatatttctctgtataaagatattaatgatctacttaactctaaagtgtctttggtaaaattctctaattctgaatattcatattttgatgcccaagtaagtgtacaacgatatattgtatccataaatctccaacaatactcccaaaactgaataagagcttttcctgattcttcagtttttaaagtagaataattagctaaaatgcctccaatagggtctgcgaatgaactaataatatccattagtactctaacagctcttggacatggctcataaaattcacatttgattaactgtttgagcacacaattgattgcatttaattggttagttagagaacgattcattatggattgaataccttccaatctaccctcgacatcaaaggtgtcatacaaaatatttgttgctgcttgatataactgtgtattagaggaaaagatacatgaccaaaacccaagagaaggttctttttcggtcaaaattagagataactgttttggtaaaatatcagtaaatttctcgaccaatttggtagcaaatgcaatataactagccacagttgaattgtgtttttgaacagcaggtaattctgccggaactaacaatagaccattgatatttctcaatgagattaaaagttcttttgccaataagggaccattctcaaatgaacgtaaatcaatctttgatgtgatgttttctaacaacgtcagaggcattggtaattcgctaatacttttgcctagatacagtttatacgttctttgacacagcaacaaaatatcataatctatgcatttagtgataatggacattgacccttctgatactgatattgcagatttacctaatccaggataaaacccattaggatcagtggctgaagcaatgacaatattttgtattagaggattgtttaacaagtttctggagtccgtttttgtgaataaaattgtttgaaaatcttcgttattataaagttgtgaatattcctcttcagtaattgttaaaacagcacttaataaagcagtagaagaattcatcagacaagctttcgggagtggttgtagactagaattattagcaatgagccttaagaaggctatagatacttttttaaccatttgaatacgtttggattctgacaaagattgataaaacggaagagtccaggacagaagatctgatactgagccaagtctgaaaagttggtctatttcatctgttgaaattggaacattttgaattttcaacaattgcagagcaaatatgtttttgtcaaatatgttgtccaaaatactatgaaaagaatatggttcaattttattccaaaattcagaacccagtttctcaagaaacatttttaatattcttaataaataatctaaaggtttattgttatattgatggaccaaatggttataccaaagaatgaatattgattcaattggatatctaatattttgttttagggattcgatatttttgggtaccaaaaaatattccaaaaagacttctttattaaataacttaaatatgggataaaatctcatccaaaattgtgttattattacagtatcccaattagccggattttctataaacaatagatggaaataaacttcttgtagaatgtcagcagtcaaactttttggatcaattatagtgttttgttcgtgtaatttttttaaaaaatctctggaccaattaatctgttcttgtgtcccctcacaccaacagtaaattataccgggtacaaaagtggtaagacctttctctgggttactaaagttcaaaaattcgtttttactattgaacaaatatttaaatatgacatcaaaataatttttaaaatttttgtttagccttaacatatgagggttacaaataatttcatatattgccatttctaaagtcttattaaaatcaacagttttttcatcaataatacgaatatctttcaatactggaaataaactgttaattctccactgacaaactatatcattaaacttagatacatgttcatgcggtacatttctttgaatagcaaaatgttgtaacatattacatttaccacgactaaaattcaaaatacacttatcacattgacttaagataggattaaatttattttgaatccagttaatagtatcttgttcattaaaagaaaatatggttagacaaaatatcgaaattggattgatagttgggttacaaaacagatgtacatcttgtgggatttcggataataatttcaaaagttcgccaagtaattgggattcgttgatctctttatttttacctgcataaacctgctcaattataatggaataaaattttgctctttgaatcaaatcattatctaatgacgaatttggtgaagtagaagacattatccttatatgtatagatataaataattgcagttaaaataacttttcttaactgtgttttttttatttctttttctcgtttactttctattgcgaattgatgattctattatattcagctttttccttgtggttttttatcaacttgatcttgaattaaagtcaaggttattaagcattaaatagtacagaaataatggttatactatagtgagttaaggacgtaaattattgtaataattatttacgcaattgcaatggaaatatccaataacaaatgattagatgtattgatctcaattcaaattacaaatattaaaaaaaaattctagtcctttgaatacgctaattgtaatataaagatgagatcaaaatgctgaatatacggatacttatgtatatatataggtatatatttatttatatgtataaggaataaaattaaaggctgattgcaaaaaacgaataaaaaaagaaaggaggatataacttcttaatcttagccttcttttttccgatttatcaaagataaaaagactagctgggtatcttaaaaatacaaaagagcacttgcaatagtagaggagttttctatgtggatgtcagaacaagaacttgacgatcattataaaggtgtattacattcaagatgaggaaagtttctctctcttgtttctttttctttctattctcaatatttcgtgtcttttccaaatgaaaaattttaagcaaaaagaaacgatgcgaaacgaaatcttttcatattttgttttttgttttatttttcttttttcaagtcatgtgctttggatgaagaaacaggttatgtgtgaagttaagaagacagagattggcatagaagattgcgagatcagacagatgaagtgagtgggtgaataccaattaccaagcaccggttacagtgtttatgtgttatattatcgatttgcaagtttatttttaagtcgatatcttgatttcttataattcatcttgaatgttttgaacaaatacttatacaaatcactattttttcagtctttaaaaaaaataaatataaaaaacctacatattcatgatcatcatcacttatctttttttttcctacttttatttcttttcatttatcaaagcttcaatcttttcttcaaatgcttttagtctttcatccttttcaagattagaagctgttaaattttccacaatttgttccagtttcaacaccaaatttgataaagtttccacggattgttttaaacccatggacttaacagaatgtgtagaggagtggatgttgttttcttcttgtttttttgtcttatcctctggtttgatgtcttctttcttagtgattttattaataacatctgtagcaatagatgttggctcaggcttactgttctttggtccatcttgttttggtggactttcaattggattagttaaaacgctttcttttctttctactggtaattcaggggtggcaggtctctcatcttcttcatcccatccagatgtatctctagatgggtcttctgcagcattatcttgatcaatattactggatttttgtaaaagtttatcgaccgaagaatttgattttaaactgtcacttaatgtagttggagtagaactttcactatgaacagtattattaacagtaggtacttttacagagggacttgaggcagtagtagcagaagtaaaagaagtagtggtggtagtagttgatgactgaggtttttcatcagtttttgtttccatggaaagcttttcatctccctttgttactggcttggattttgctagttttgtagatttatgaaaagttggtgcagtaccttcataaatagatctcatacttactaatatcggtccgtcaacgtctttacccaacctccactcttcggcagtcaaagcaggttgatcagatggcgcgtctgggtaaatatcatcttgaaactcctcagatcttcttggaacataaaatgaaacaggttcaatggtctgatcaataactgtcttgtaacacttcaatacttcatttgatttaacgtcaacaaatctttttggtgctatagcgaaccctctttgtggatcagttgattgaaactccgataattcaaacaattcatcattttagaactcatagtatctaatgttaccatcacctttaccagcaatgtataatattttgttactatcatcaaagaaaggcattaagatacctgaggattgatcaacagtgtaaaatccacctaagtcacctttttctaaattgaatgcatcccaaatacctatttgacgatcacttaatctagaaaaaccagtagtagccaaacggtcagagttacctaaccaaacaactctttgatttttggcaccttgatgggctgaaccttcactgacaaccttctccgccctaatatcccatactctcaattttttgtcacgagatacagtggccaaatgagacccattgtaagaaaatgacatagaagtgaccatatcaggatgtttcaaagtaaaaatattgtcgcctgtctccacattccatattctgactgaataatccaaagatgatgtcgctaaaatatctttagctacaggatggaacaaaacatggcctactttcttagtatggccggacataattttaattggtttaatatcctttggttcaccatcctcatttaaataattgtggaaggagtaatcctttggaatttcccagatagcgatttttgaatcatcggacacagaagcaactctgtggtcatcaaatggatcaaaatcagtatctaatacttgtgcagtgtgtcctctgaaaagtggtacctgatctggtgctttacccacctcttcaactggcacaattgcgaaggcaccaccaccagacgcattccaattaacagaaataaattttccgtttgtcttaatgatattggaatcccaagcattattagtcacttttatattttcatattgcaattctcttttaacagcttgaccaaaaacgtgtctatatttagaagcacgaacaaatttaccactcattttgtttcaaaaagtatatcttagatagataagtgtattagctagtctatagttcgttgaatagccctaaataactgaagtacttaaaaagagaccgggtatgctactaacgtggttacaattatgaaattatcggaacaaatatctatcaacggttgagatgcactagtatatgtccctttacaatattgaaagaaggaatttttcgtcgtgtttgcttattcgtttatttcctatttctctgagcatgttttccctcgagagattgaatatttcgtattagttagtccattattaatgtttatctcaaattggaatcgattttttttttattttccatccgtttgttttcgcttcgaagagatatttccagaggccgtggaattactttccgcagaatcttgccaggcaatttccaaaaaatcttttttattccgcaaatctttaaatggaaagattctacttgaattatttattattcaatggcttgctatctgtaagcagaaaaccaatcaaacggaaatagaatagagtgcttattactattaaagtgtgaaggtccaactagaattgcaggcaagattggaatactttgtttttgtttctatatacatttttcattagagtaattgtaagaattatggtattttgtttcgtagaagttatcattttgtaggtatcgtttccaagatactacaacatttgagtctccttattgagagcattaaagtttttttattgttcgcagctttcctttaaatgacaagcatgtcagtgttcaattaacatcatgtaaaaacaatcgcaaaatggttttatgatcactaaaagaatcattaaatgtctgtacattctagatatacaaagttgtttattaaaacaaaaatgtgatatataatatacatttattatccatgtctagacagaatatatatatatatttatatttatatacatatatatttttctctatttcggctaggtactgaatagtaccactttacccttttttttattctttctcatcccattttgtccattttgacttgattggttctgaaaagtttgacctgaagtatcttcatacatcccttcattggctgcatgattctcataattacagttatcatctatttcgtgatcttttcctctcattttttgaagtaacattgccgcaaattcttcgtcctctttgtatgtcttttcgtctggaataacagatattgatgtaccccatacagtattctgtttatatgctttgtttttattactgcttgatgaaatactttgattagaattatctattttctttgaccacaaagtttctagtgttgtaccagaatcaagcagctttttataatctgcagtttgttctgaagttagagaaaagacaccgttttcagctttataaaatgccataatatcttcctctaatttagcctcatacagtttcttgtttctttcctctctttgtctttttatatttaattctttataacgttgttttagttttccactaaacttttcatacactttatcagttaaaattgacatttccttccaattaatgtctaaaaatgcaatttctgtacctaaaggcaaatgacccatatacttataacgatgaattaatttttctgtaactacagtatcatagtgaatgttttctacttgaacttctagtgtagagggaaaatttgaatatttctcaaaaatttcaagtaaaatcttaacatctaagggacttaaaaagtatttagtagaagtattatgtgaggtttgataaaagtagaatcccgagctatcatcaatagtcatagaaggttgattttcactttcttgctttccaatcttcatctttatgaaattagacgtcaaattgccctgggtttcatctaatattgatactattgtgttatttatttgttctaatgctaagtcaatgaattgttgatcattaacatcattatacagtgctttgtcaatctcattttgtatctgcatagcctcaatatcctcatttaataattttaatttataagaggaatcacatttaactaatctactatattttatttcattagtattatttatacttggtatattaattatctcatgaatattagagcagacttcgattggtaaagctagaatggaagctttctctctaaacattagatccaatttaacctgagcacctggtttgggaattggttcatctttaatatacaaggcgctatcttccaaatatgtcacatgattgattcgttgaggcctgataatattgttacataatgggcattctttatattttttttttttaatttggccagtagtcttgtctttaaacctgtcttctatagagaagaattttagcaagcatgaataacaaaaaatatgaccgcatccaaccatccttggcgcaataggtttctcacacagacagattgggcactgttgtccagaagatacaactatagatacaattttgtcatcgctaatcatacaatttggatcgttgatttgttcagaataatttcccgtgtcctctattaatagacgataattaacattgataaaggaatcgcctgttaaattgatatgttcatcttcatcgatttttttcttacttgaatattttcttctagcatttgaatgggtatctctatctacttcgggtaaattaaaatctaataggtgattgatcagtacttgagcttttttacccttcattttgaaatttccacccataatttcttcttgaatagacaaatctaagttatcatcagaaaattttctataagttgaatcagctctccttttttcttttatttgattattaaattttttgtgactcttggttctgaatgatttatttagcctttcatctttggattttttcttcgtattaatttgacttttgttcgatatatttatctggttcttagctcctttgggtgtctttttcttatttttaccatccagattgacttgctctgtattgatatctatttggtggtcgaaagaatgagatccttggtctttagtgttatcattcatattgaactgattatcagtattagaatgatatcatacgaatgaaaatgccaaaaaataaaaaaataggtggataagtgacgatggatggtagttatatgactcgaatagttatacagtactggcaaaacaccttatttaagttaagccaactttaaggttctatgtacggaaataaccatgagtaagcgttatagtattcatgcgctcacttatacaactgtttggctaaggatatctcacaaagatttcactaaaaatgtgaaataaagaaaaattaatcacaacaacaacaaaaagagataagaaattaaacacggatgatagaatataaaaaagtaagagaatacctgaaagagtaggtgactaaattgctgtggtcataatttactaaattatgtataatgtctgtagacatggtatttgaaaataaaaaatttcctagctcattacgtgtatcaagcaaatatatacagaaaaatgctcaggagtaaagctataaaatatgataaatagtaaataatactacatgaggacaaatatctattagttttcagttggtaaacatgtgtccattttggaaaaagatctaacaaagttttgaatacatgaaggcatagacatcagtagataggcaaagttagcataaagaggttcatatatcaccctttgtctaccaatcattgaacaatctattagtttctttgccagctgttttgtatctacaacaggagcgaaaaattgccttggtgccttgaaaccattaaacatatttgtatttaactgtcccacaataacaagaagaattctagtattgaaatagttttgtgtatttaattcgaatttcagagaattggtcatacatgtcaaagcagctttactagctgcatacacagccgttttagcaggtgataatatacctaatgtacttgcaatattaatgatataacattgagaatttgaagactgttctggtcttaattcttgaataattttaaaaggtgtataacaatttatttgcattactctttgtaattcagaatcctttatgtgattatattccgaatatgaagatctcacaccagcattgtttataattaaacatatttggtttccgtatcgagattttatatctttaattattttttctacttcaaggggattagtgagatcgcaacattgaaagaccactctactagcatccagtgttttcttatttggttcctttatgtcaatattaataattttaattttctgtgagctagttagaagttgggaaatcagatccttccccaatccattactaccacctgtaacaactgctaccggagaatctaactgatcaaatggtaaccatttttgcctgttgatgattctattttgaactaggcaattaaatattgaaaaacataacatacatagtgtataaacgcccaatatgtaaattatacgccctgagatgactgttttgaatggcaacaaaaaaaaaaatgggtattttataaaaggtaggaatatgttatatactaacacatcaatgttcaatgtttcataaataggcatcttggggtattcttttgtctaaaaacatgaaggcatatataattggattgataataatttaattcttttaactttttttttcatgtagcactcatcctaaataatatgtcgtttgtttattttttttttcttttaatagaattattttagataaattgggtattatagaaagtgcttggaagatttaaataaattattagtataatataaaacaacacatactttacttacacaaataaattaaaccaacgggtatcatcttgttcaagtattattaaaatatcttatatgaatatattaagattttttatatagaataactcagcaaatatagaattatatgcaactttaaatctagtaatttgtaatgttacattttaataataattgtctattaggtatatttggatgacttgattttaatattacagcattatcattaagattatcatttaacagatatatttttttacctttaattatttggcatggaatgagttcttgtaatggaatatccatggctttattgatatcatatacttgaatcaaactttctgacattaaaagcacataaccttcaaataaaatagtatttgtacagtaaaaatccaacatcaagacattttgtttccagttatctagaattccgtggcaattaattttaattaaaaccttgtcatatactagaatgaaatctttgccattgttaagttgaaaacaatttaaggggtttcctccagttgtataaatttctttaagaatatttttcagtttttgatactttagaatatctgcagaagaatataatgggttattttcatgaaacaccgattttacaaattttaatttatttaacgattctgtaaattctgcaacatccacaatgataggaagagctattccatcatcacaaaactcatcaaaaaataagattatccctttcgaagtacaaacaacaaatgattttttaaaacagacaatttttgatacagagatattttcaatgttcactaagcctgtaggtaatcgatattgtttatattctttgaaatattttaattgtctactaattcgatcaaattcaggagtcaaaacatagaccttgccttttcttgtgaaaattaaatgtttggagttaccaaaatcttctgcaaatttaaaacagtctactttatccttgatgactataccaataattgtattatctgatatatatttgtttttatcataataggcgcctaatatactagccaaactaaagtagagaagattatgattgtttagaatgaaaagtatcccaagtttgcaattcacctctacttttgtcacacaatcacactcaactaccttttgaaagttactgtcccttccattttctagtctcaaaaataccccataattgcatgcaacaagtataaaacttttcccttcataaatgaacatagtactggcagagatggtgcaggttaatggtaggtttacttcctttttaactttcttttcatatttctttaaagcaatatcaatttcagatccttctatagcaactggtaagcttaagggtgcttctctctctgtataggcaaatctggcacttaatatttcaaattcaactacattttgaatgcgttctttggatttttggatagttttcaaaattgatgtggtccatatttccttttctactatagatgaagtaataaatgtaaatgattcattcgttgctgtatttctgattttaaaagttaatgtatcgggatcactttcattatttgaatcactacttgttaaactattaatatctgaattaaagaatactctttgacttgtagaattgaaatttgtagtttttgatacagtcaatggtgtttgtttaatgttatctgtctgaatatttgttgaagattgatctgtgtgccagctttctctttttttcgatcttttttttttttcaatacttaaatagtcaattggtataggcctttcaatcaatttataccaatttttattatttttaacagtgatttctgttattagaaaatagttgtctagtaatgcaatatatactgaagtggaatccagccaattctctctcttcttataaactgagcctgaataaattaatttcctttcgttgtttaacaaccctaaatccaatttatcctcaattaaagaattggccttatttgaatgttcagtagctgataagggtgtcgatagatttgagtagcctgtagtattttgttgttttctgctatcaaacataagttgtctggagaaccttataagatttctatgatctattgcatctccatggactctatcaacttcctcatttagtttttcaatttctttagtagcgagcgatatgtattcatgatcttcatctgaaggatcagtatttttaagaattgattttaatgtaataggtaaattctgtaatgatttaaaaaagccaccgaaaaagataacatcatggtataacttagaacgtgtaatttccggactattatctatcatttttaaccattttgcaaatgggcttccctttttcttctcatattttataatgtcgtgaaccgtagccattgctcttgcataatttatatatgcatcatgagcctcgtgacaccatttcagatataacttaccaataccagatatgaattttccctttgttttaattttccaattgatagggtttaataaaagttctgtatgtaaattaattaaagggataaatatatcaaatgctaaactggcaaaattaggttcatcaggtaataaagatgggtcatattgtttcccatatatttctacggctgcatttgccatatttaatgatctttcttctaaaattattaaatcaaatataaaactttgtttttgtacatctctgggattaatatttcctaaattttcttcagtaagattccaataatcagcccatactccaactgatttattgatgatgttggaataagaaactgcatctcttttagaaacggtcattgatctactatgacaacttgtagagtagcatttaatgtaaagttcattttggattgtatcgtcaaatgaataacacggaagaagctcagtaaatataccttggatgtcaagaccagccgtaacaaccgttatattacttattgtactttcttctgtagtctcttcatcattttcaaaaatgatattaggttcgaacctaatggccttctgtattaataatgagtttataattctatcaacgtttgagtcaattaaatcttggtcaaaatttgctggaatttggaattccagtaatctttgaatcatttgataaaattcaaattgaccaaagatatactctgtaaaccattcgaagtaaacttttaaaatccattcatatatatctgataatctataaactgaataacattgatataatttattttcatctagatctgagatgttaaaaggatgtgttggaacaatcacacttggtgcagcttctaaaggtctaccacccagtaatgaattataactactatgtcttgcagaagagtcattaaaagtgtaacttgcataagaataacaactatctatactttccgagactctactcaacccacttatatcacgcaatgtagtaggcacttgtggtggtttagtaaacgcttcagaactttgagaattgtcttgtaaattcagatcacttagttttatgatgtaatcatttggtgttatttgttcatgtatattcgaattttttttaagtggagatgactgactactatactgtgtagatataaatgacgattggagtgattgtggtggaggtggtggcctacgagttcgactttgtagtggtgaatatattttattgtttctaggactttccatgctgggagatcggttatttaaaggagaataattattgacccttctttgaggcacaagatctggtaaggtccatgatgattttatgaaagagttttgatctttgtctttgataggtgtaatgcgtgatgtttctgtattatgtgttagtatagtatcttgagttgtataatattcatcattaatttcatatctctctaaaaatgattctctggtaactaatgggggcaatgttggaagaatatcatttctctgtgagttgcctccagaagatgagttgctgttttgtttattggaatacattaacctttttcgttctccctaaaatgcatctttctttcagtaataactttgcctatcatgagggtaaatcttacgctgatgactgttcttttcttttcatatttttcaccatttttattgaactttttgaacaaggtaacagaaaaggaaaacaacggggaagacctttgtaaaaaaaaatgaaaatgaagaacaaagtatacacatgaggaagttagttgtttataaagagatatctatatattttttgtgctatcatatatagtggagtgcaatttcctaactacattttagatcgttgaatatatcttttagtatattaaagtcagtaatagataaacgggaaattttttgagttttttagttggtttttgtttatgtatcaaagatttaaatttttcatcttacaatatatgatcaatcttgttatttattctctattaattagcgatattgcgctttatagtgattgtgttgaaacattgtggtacttgttgaaatagaatgttctatgataaaatagatagaacaataagattttagcagacactaaacgataaattgttgagtaataattgttgagaggtcaccaaaagttgttgagtttatttattaaatatcttactattcgtagaggaaaatggctgaatgttaacatatataaagccaaggatttcatcatacattatttttatcttatttacaatctttctatattattatttctatgttgtatatagagaaagaaagtgaagaactttattataattttgtatactaaatctgtttaatataatattgagaatgtttactatatatccaatgaataaaggcgctcattcccaacagtactatataatttcagaatagggatctgtaaaataaatcaggggaaaaaaaaagcaacaaccatattagtgttgtgatgaactattctttttatactggttcatataaactttttgtgtttgtttggtatatgaggtgttgctttatttattatatattaaagtatgaaaaagaacaaatttataagattatcacttttgacaaaaaaaaataagaaggtatctaagaagttatttcacaccttgtgatcatttttttacatatctgttagaatattatttaggtgtaaataagtgtagtccagtaatcagtagaaataaagatacaatacaaggaaaaagaaaaaagaaaaaaaaaaaacagcacactttaatattagtattattacctcttaatttttttctaaactaataggagcaacatactggtattaatgtttgttcgttgccacttattgaatatagtgattttggttttatttaattatttcatatattaaggtgtggtgaagatgtttgttagtgttagtagttgtaattaatcgatatattcttttgtttaatttgttatagggaaaaaagttagttccaacatgtctaaaatactcaaaaaaataagtatcaataatgttcagatataaattgtataattgttgctttgtaattttttttttcttttggttttattatatatttttaaatgtaaagcaaacggcctattcccaggtatatatttggcagtattttcttcattttatgtttgtgtgttatagtagttcttagtttagccgtagttactcctctggctgaataatattagtatacatgttcttagcgtcggtgatcatacaatatgttattattgtgtattattattatattgatatgtagtgtaattttccctcgatctcttgattgggaattaataattatataaatatacaagaaacataaagatacgatgtatatatattattcatccagattggaaaattaataagtaaagttgtctacttatatatgtttaccttttggcaatttttcataatatattaatttattttgattctgtttaatcttatctccataacgttgaatgtgcaaaacaaacatttttcttctttgatatatttacatgttactcaaatcggtaatatatcaatccagcagttaccacctaaattaatgttgtataatcatccaagattcttgacaattttttttttcctttttttattttttttattttttaagttttgtgaaatataagaggagttgatagaataaacaaattcaatcaatttgatttttattgatattatgattttatattgagaaactgttgagaatgagcgcctgtattcactggatatatagcaaacactctcaatattatattaaacagatttagtatacaaaattataataaagttcttcactttctttctctatatacaacatagaaataataatatacaaaaattgtaaataagataaaaataatgtatgatgaaatccttggctttatatatgttaacattcagccattttcctctacgaatagtaagatatttaataaacaaactcaacaacttttggtgacctctcaacgattattactcaacaatttatcttttagtgtctgctaaaatcttatttttctatctatttcattatagaacattctatttcaacagaaacatcaatacattatactgccaaacatataattaaaataaggttcatttatatatgcttgctttagaaaatgggaaaagacgataattaaacaaatattacactttgacatcaaacattcttcatatctctttttttttttttttaagattctaaatttaatatgctaaacttctgagaaagtattacaatctagaacttccggtgtccatgataatgatatatatcattaagttatagatgcttcttctattttgtgtgaacttcttatattacttccaatacttcttttaaaaaaatccattttcttcaaatctctggcaagcacttttaatgaaagaataagatatttttcatatattatgatgtatccatacactacataattttacagaaaaaccaaattaaaaaaaaagcaagtgttgtggcaaatatcggtgatataaaaactctcattttttaatgttagaatttggagccttctgcatccatggtaatggtagacatcattaagttatagatgctttttgtattgtgtactaaatacatatatatacttaatatatagtgtattcagtacacattcttttatttactttaagttttcttttaaagtttttcatttcttttcaaatcttcgaaaaacatatttggtgaaaaataaaatgtcttcctgatattatggtacatccgtacaccgcataatatacagaaaaactaattaaaaataattcttatggaaatagcagtaataaactctcattttccaacaacattaattcaggtacactaatgaattagaaactgcaccccaattctctaatcatggtaattagtaatacacgtgggatttattaaaacaataggtaaattctagatttgttaaatcttatgtaatccaatctctttattatgcagcatctaatgttgtagcacgtgtatggcttattaagacaataaatagttctagattcattcaggatcttatgtaatcttgatggttataactattctattccacaacaattgtttggtcagttctaatccactagtgcacctaaattaatgtaataaattttagggtgaatcagtcaagtcattaacgtactaatctgaataatcgatcgagctccagaaaacatataaaaggacaacgttttctggagataaaagatcatcttccataaccgtttcttgtaaataatttatatattatatatgaacaaaaagagaacaacaagcaagtaacaagttaagtaactttgaataaataaattagctcgatataagccgctcaatatataagaccattttagtaattatattatcgcctataattgattactatctcgattacttgaatgactattaatattatttgcgcttccctggaatacacaaagaatttcaccacttcataatacaacaagagctgttatagttcggactgaggaccaatttttttaacagtactattgaacgaatagtaagggcaataacaaatatataagaacgttatatatatctaggagaattaaacgattattgcttgttttttttttgtattatacaatgtgctacatataattataaatcaaccaaacatataaatttagataccaagatactggtcctttctatatgaactatgggttgataatttcttatttgaggttctgtaacgactgtcaccgtagatacatttctccttaattagctatttaatgtttcatgaatgtttcattttgttacatagtattcaacaatcatgtgggatttatcaacaaaccctaagtcctataaatccaaactagaacttttcttgacaatcatcacaaaaccctaacaatatttttataatcataatatcaaggttgatctacgacaagctaatgtgtagttaagactccatggccaagctggttaaggcgtgcgactgttaatcgcaagatcgtgagttcaatcctcactggggtcgtgtagttgactttttcctatccgttgaaaaatggaactgcatttaaaacgccagtataaaccaaactattccccggattggagaagatctttctgtttttactcttatctttttaatcaattcatatttctaatattcagtaaagattggtgaaatgaaagtataccaaatcattactgccttttacgtttctttcttatatagtttaaccagtttccgctttctgattgtttaacggaatcacaaacctccttattccgcataatccgaaaactgtttttacggaaataatttccaaacaaagccttatataaactttttaggcggaagtgttttcatatttttatttttacataaggaaaaagggtgattggtttgaataataaaaactagcaaattcacttcgaatcgtctgtacatcttattcttttagatttattactactgacattgcatgttaagacatatgatagaagtaggaagcacatttagaatattgcaactccaaattaggatcctagattagtcccccacttgttgtcattaacatatttaaaccatacaactagatcaattaattttggttttcaatatattatcagcagttaatagtccttattctgtgcaaaaatatgtttcgttcgcttttagttaagaactgtaaagtggttcaaacaaaaagttttctaaccaagactacagttaccccaattgcctcccatatgtttctccatattacatcttattcaaaaaataatggggtatgttcacaaactacaaaaaaattttattcaaactatactaagaacaagtataatactcatggtacacttgatagtacactaggtgcaaagattttggctctgtttgtggctggtggtgcattatactttgtttcccctagaaaacatacttcaaagaagcataacactcaactgaatgatcctatcgagacatctgatacagttgacgactcaacgaaggttcagcaacaacaacaaccaactgaggttataactaagcctgcttccacagaacacattgaagcttataacgatgaaggattaaaggatttggaaactgtaaatggcgaaacattttttgaaactgaagaggaagttaaccaagaaggtgcatataatccagagacaggtgaaattaactgggattgcccatgcttaggtggtatggcacacggtccatgtggtgaagagtttaaagaagcctttgcatgttttgtttattctgaagctgatccaaagggtattgattgtgtagagaagttccaaaaaatgcaggattgtttcagaaagtatcctgaacattatactgaacaattaaaggatgaagaagaaattactgaacaattagaaaaagaatctgaaccaaataattctaattcaaacaatattgacaccaaggaattcgttgaaattgagacaccagaaactttaactagttttagcgatgaatcattacctgatattactatggaagaaactgtggtggtggaagatgttccacagattgataatgctgatagtgatgaaacaactaaagaaattactgaaactatcgaagacattgaattaactgaaaacagttaaataaaatcatagtttaatgtctttaataaaataaaagggcttccgtgtaaataagaatatacatatacatatatacacacacatacatacatacatgaatagatacaaatatatatgcacatgtatctagtgaaccacattctgacaacttgttctcctattcatataaatatataactcttatcatgtatctatttcgctggttttgtaatcttcatatatgaagttcatgtaaatacgttggagtatacctacctttatcatcttctacccataaaatatcgtccttaatggcaatatttttatgacgtgatccatttcttacttcataaataggcaccaatacacaattaatcgaattaaaagatatatctgtatatctattattcaacttttgtaaaatataccctttttcagcacaataatcttcaacaacttccttgaatgttactgtaacctttcttatcggaagtgacaccactttatattcttcactatcacgatcaacatgttctgtatttttattagtttctccattaatggattctaaagaatctaaaagattaaaagtctcatcatgaattggtattatctcaacagtatcaacattattatcatcaccataacaatcgttgccattatcgttattatgtgagtgattagtaaacttggaaagaaattctttacttctcttgatctgagatatttcaagttgggaaggtatattaatcttcatggatccagaaaacaccttattaataagccaattaaaccaacgttccgctctttgaactagcagttgatcatacttataataaaaacaccaatcaaatataaacttattaattgaattgaagaaagatagaataaatatttcataatcttttggataaaatatatatcgatggtctcggataaatttgaatacatatattgaatcaaaattatcttgtacctcttctatattatcactattggtataattactattacttaaatgagccatatcgtattctaagtcgaaatatttttcaaccaattttacaaactttggtaataaaatttttctaataattttataaaactgatcatcagaatctaaaatttgtttaatgatcaataaattttgtcgagaaattattgagtctctataataccaatgataacaataatcttcaaatttattcttcaccatctctttaatgtctttaatcttttcatcctgtaataaaataagaatgtttaataaccaatttaaatttatactgtcatcatttaactcccaatcatcatatattatatcttcaatctttggcataagaacattttctaatagataatcataacaatctaaatattttaagagttgttcataatcaattaatgtagcaaccaaaatatcaaaatctatagtacttcttaattttgtcgactttattaattccattatactaggatatacattttgaaatatgactgtttgagatctgtttaatttttttttcaaaaatttgttttcatcgattctatattgaagaatatcgactataggtaggaagtacttttgaaatggtgtattcgctaatatccaaaacttactatcaattttatcattaccagctatttcttgatcgtcatcaacacaattcttttgaacgttgaacaagtgttttaaaaatcttgacattaaaatatccataatatcatcattttcaatctgtaaaattttctcaatacattcaggaacctgcattaaaaatacatctggatccttgatagaaagatgttgaacaatatcagataatatagagccagacacatccaaaactttgtgttgcacatttaagttggcaattctatcacttaaagattctaattgtatctcgatattctctaatttctgtacaatatcaattatttgtattcttgattccctagaaataactgtcttagtttttaaattatctaataacgtatatggaattattatacttgggtgatttatttctagatcttttaaacggtttatgagctttaatttttccatattatttaaagtaacagtcccctttttattgaagataattttttttttcttagatgatttcttattctttttagacttttcatataatgatgttagagtattattaactatattctcattaaagggaatagatgtctcagaaattattgaggaagaaaaggaagaagaagaagaagaactgtaaccgttgtcatcttctagatcatcatcttgataattagacaaatcagaaagcatgcccaagccagctttcccatgtggccttttaaatgcctcaatcggtttacttatgcccttaccttctgatccaagcccatgtccaattttgtaacccatacgggatagtaatttggcaccaaccccatatcttttaatcatatcgtcatcatcattattattaccaatatttgttacattgttaggtatcacattcttatctaatttttgtcttttgcttacagcagattgagaaacatccttaatatcagtattattcatctagatttaaatattgtagatgtttttatatatgaatactaataacaaagtttttatttatgaacatcaacctaaaaagaagttcttcataatcactagttcaaaacccttgttaaacaaaacagatgataatatagtggataaagtcaataagcactaactctgaaaaaaaaaacaaatgataatattcttttatagagttcttcagtgctgatttactgcttgatgacttttattaatgttatatctactatcaaaaaagcaattcttttttttttcataaaaaaataaaaattagggtaattatataattgtaaaaaattataccaattttcatttaagaaacgttagggcaacagaaattttgctaatctttttctttttgtttttctattacacaattttatataacacaaataaaagcagcatattatatggtatgtatagttaagatctaaagaatatttacaagttataaggatataacagtcttctaacccaactctcgttttttatcagccatacaagatacgaatagttctatgaaaaaaagttataacttattcacaggttagaatttgacgtaatactgtcaataaaaagacaaaaaaggaggctttgggatattcaaatgaatagaagttaatggattcgagtaatttaaaacattatttaaataatgctataaattatcttgttgaagcgcaattgatatgttatgattgttcattaaagattaacactcagaggaaacaattatctggatggcaaaacaaagttaggaagattgtttttattcaagattgtataattaaacaaagtgaatatctttacgaaaatgtgttgcatggtagaattgaaaactccttattaaagggagaatggtcgaaagattcgcttaatcaattgacagaagatatggaattttggcaaagtaagatcgaagaaaaaatgaaggaattgaaaaatactgagaatgttttggtaaagccacagaacaaaagtggtgcggttacactggctgattatgttactggtgaaaatataactttgttaagagataaaattaaagaaattccaagtataaagaaacatattaacaatatccatattcaatatgatgaactaaatttaacgattaaaaataaattaatagataatagattaaatgaattaaaatctctaattaggaaagaattaaatccttattcaaataaagatttaatttcaatgtttactttatacccaaaacaattgagtgatttagaagatgatttaggaacaatattattatccttaaccaatcattttgacagatgtaaaatgttatttgaaaatggacaaaaaaaggaaaataattcagattctcttgctgataataaaaaggaaagtaataattatatggaactatataaaattgtgaaaaaggatgatgaagaattaccttcaatattaaatacagtaaaagaagttattaatgatgtgaatatatcattaaacaaatcccgaaagtttttaactgaaaaagaaaatattgtacatcatgtcaagagcaagattaacaaaatattgagtgatttaaagaaatataatgaatatcttattgtatttcaagatatatacaatcttataaacaattttaaggattcatgtaaacaagatatgaaaataatacatgacttatttgatttctatgaacagttccaaaaaagttataagaatctgttgaaagaagcagataggagacgtaaaatcagtctagaaatacaatccatattaagagaatgtgaaaatgaattaaagaagttagaaattgaggatatatctaaacgtaaaagatttttagaagataatggcaacttcctacctggcaatatatggccaaatgaaatcgataactttgaatcactttatacaatagaatattcaatcaaaaaactttaatgaaaagcaaacaaaaatgaaaaaaaagaaagtaagacagtaaagtaaaggatgatataaaactaggtttgataatagttaatatatatacttacttatatatatatatatataagttatttacatacaagaataatgatacgtagacataaaaatataaaaatgggataaatacagagagaaaggtatgctttaattaatttgcttctggattagataaaatatattcaacagtttctccaatggtttttaagtcatcagcaatcttatctggaatttcaatttcaaattcttcttcaatagcaactaataattcaacagtgtctaaagaatctaatcctaaatccttattaaaagctgtctctaagctaattttttcagcatctgtattcttattaaaagccttaataacatctttaattctctttaagacttcatctttgtttaaagtagaaccacttttagtgtcttcggagtaaagacgaatatattgtaacctttgaaattgggtagaaaccggaacaatgtttttagtacaacaataaattgttctactcgctaaggaaacaccactctgtctcataacagtagagtaatgcttagtagcaattcttaatggagcagctcttattatgcttcttaacattttttctttattttacgatttagcaactctggtaggtgagaaggaagaatctgtgattaattaggcacaataaatgaataaaaaaatactaccttggaaggcgctagttgatacttcttctactgagtcagaattaatctgatgagattttagttataatgtactttatcactgacatgtttgactatgcaagaattcttgatcatttaatgaatattaaatgtacttttgtattctttatcttatttttaatccttcaaacttattagttaatcatattttttgtgttcaacagatgatcactctgaacgagacacaccattttctattttaaagagtgtacaacaacaccgttcgtttaaagtgattactctagggttcctacgcatacattaaatataatcttaatctcattttataaggcattcccaactgtctcccctaattcatcaacataaaagaggacaaaccttctaatatgattcacaatttggtgcacctgttatcaccatcacttgcaatgtcgatgctacttatctttatgcttactagaatgtctgcataacaatcactggcagtttcttcttattcttagacatcaacgtattgaaacgccctctatcttgattgattgtgtatagatgttgtacatctcttgttggggtgcaactcatctttcatgatatcttctattatcatttcatcaagattaataccatttcgcttaatctcattcgaaaaactttcctgatataattcaactaggattttatgattatcatcttgtatgccgctaattgtttgtaatctttcatttaataataaacaatggctcaataaaacagtcagtttatctaataacagtgccaatttttcaattttatttttagcatattgatcacaagtgggttctattagaaactttctatacttagaaagtccaccatttactggtgcagatattgttcctgttatgtttcttgaaaattcttgaaacaaatttaatgacaattcgtcattatttttgaccgtcttataacaactatactttaatgttgttaattctaaaatctttgtctctatatctctaatggcattttcaattggtgatattcttcttttaatgacatcttttacaggtgacttatagaataatgttggaaattcatccaccgtagtataaatatattcttcaacccatatatctgctacatcactcgatccaggtattctcttcgaatatttgaagacttttaatccatcatgtaatcttgacatactagtggtagtatctaatatattatttgcttggtcaatagctttctccacaggttccacagtaaccacactaatgaatttatctatttttctgtttaacactgatatttcatcttcacttggagtattcacaacttgtgaatacggatacatttgtaataatctactttgtattgatgatatatgttcaaacggtaacccttcataaataaacaccttatttcttaacattgaaggaaatccatttccaaagaattccactttaaagtaattcggaatcattttgtccacatgctgcatttgtatataaatatgtgatatttgatcatgaacaaatgctaatccatccatatcataattaacttcgttgtatgcgttaagtaatttattgtaaactgataatgctttctcaaattttaacccacgagaaaaatttctaccagcttctttataaagatattcttttctttcaaacgatgtttgttttggtaaaggtggacatttaatagctgcataataataatatgggcaccagttatatgtgtttgcgaataactctaaaattaatgctgcttgaacaaaatcttgttttttaataaaaccgatgaaaaggtcattgattaatttttcaaaatactcaggatgattaatatccattaaatgattgaacaatttgaatttacaaatgatccgttgatcattatattccaatgatttaggtactttgtctaactctaatatgtgttgcagaaaaataaacaattcttgaaaaaaatctataatagcatgaaagtgtaaatcattttccgagatatcaatggtcatgataacacatctaatgtaattctttagaatttcctcctcaatatgtaagttaccttctttgtgagtattgtatatctctattacacatttattcaataattccactaaattaccagtatatttccaatatgacataattacatgaaataaaaatttacaataaattttagtcataggaatgtctttttgaaacaaagaaatgataatttcctttaataaaagcggggtgtcgacaattaatttgtatttcatttcaaagcaatcagaatgttggagatcctctttccttgatatattccaaaaggtttccaataagaaaaatatttgctgcttcatgttatctctcagtctacatataattttacctggtaatatgcctacttttaataaacttactactttgtgattggatattttaaataagcatttgaaataagaaatcaataactttttatccttttctctagatttttctgttaaattcttcttaaagtaattttctaagataaaatctttacataatattaaaagttcaacacaacatttaataataagagcagtaattcctaatagtgtgttttgtgggaaaaaatcagattccaccaaagattctactgcttcaattattaccattacagattctttgtttaatttattaatatagaacacagaatcgaccctcatctccaatttacagtcttctaaaagagtctcaaaagtaacataattcccatataatgttgttgcaattgctgataatttgcaaagaatagtagcaatttctaataatatttctgataaaataatatggtccttgagtatcaaatcaacaggatactgccatgattctaatgttacaggaaacaatgcagtaaatgtgcttttgggattgttaagattattttccctatgatatttgttcacttcaagaaatatctcacaaatggatggaattaatctcagtaaatgtttcattaatttaggatcttgaacattgtcgatgatatacatgatcacagtgttacatagactaaaggtatgataaaatttagaatttctcataaatatatgcaatgattttaaaatccattgaagtgttttactcagaaaataaaatgcaataggatcaatatttaattgttcgaaaaatcgagcctttagtttttcatgccgaattacagtttgtaaaataagaaattttgtatttaaatacctgacttccttttcattcaaatttctattatttataccttgtaaaagtttactcctgataaaactttggcatataacttcagtgtaacgaagaatcctatccccagcaagatctatatcttcacccagtatccatacattatatgcctctaataatgaattttgaccattccaaaaccctctatctgattcctcgataaattttgaaatttgaatcattgtgttatctaaaatattgtaccattctgtcttacagtcagtggaaataaaagagagcatcaatagaaataaaaattcttcacagatatcattaagttgatttctgttaagcagaattctgttttccaataaattatttatctctattaaaatccaataacctacttgaggtaaagaatctcttaactttaaatgtcttccaaaaaacacaaaaaacttttctttataacctgaatttggactgtgtattgtcaaccgtaaaaaactagccaaggataacactaacttttcaggtaattggttttctagaagatctagatatacaatcatttcaaaaaactgtaaatatttgatcaacatttcttcaaaatacttatcaaacctagcagaattcaatttttctattgcagccagaaccctttcacttttttccttaaactccatcatattaactttctttttcactctatcgctcattgataataatctattaaaatctcttataatactgggaggattgaaatgagatccatgataggaaatatatacaaataaatcaatgattctatcaccttgggatgaaaataatgggacccctttcctagataatgattctattattttcccatctttaataataagcagagaaccgtgtgccattaaatatccatttatatatgcaaagatcttaaacgattcatttttcattgatggcaatatattgataatagtaattatctcattaatatattcttcaggtgataccgatatagacatccaactgtccaattccatagtttgtgtgccgttaataaattttatattttcattcattggaagaattttaataacaatactttttatatttgtgatacgattagtaataccaagtaaagaaacttttcccaattttaagtatagtttttcaagcactctatttgatactattagatttccataattctcagaacactttacatttttatatataggataatttccaccaatagattctatttctttgatactaacagtgatggacttagcgtgacgataagatataagatcgtccacggaattagtaagaatatttgtaattagggatccccactcttccttgatgtgagtaatactcgaatgtcctactatattcttataagtcccatatttgggtttttctttgtcatcttttgagacacatgaataaaggtttacagtaaatttatatatatcttcgtttctatgttgcgtcaaattagaatttgatggtaatttgcttttgaaaatagacgagatatcaataatgccaatggcaacaccttgattaattttatgaatcttactcaccatatttgtatctttaataagtgtaaggggctttataaaggaggataaaattatatcttttttaaaggatattttaatttctttttttaaaacaacaaccaaaaaaactctgttattatacacaaccgatttcagcaaatctttgaaaaatactgggcaatgtaaattaaatgtagaagtgtttttcaaagatttatatggtatctctaaaggttctgtaattaatgtctcatcttcggacatcagtgacacaattaccgttaatttatttaatccatgcatgccatttaccatagcggttgaaattttccaaatatttattaaaacatttgtagtcaaataatcatgaataactatatcagaagccaaaggtatatcacatgtaaaccttttctttgtcatttgagaggagattaaatattgatgctgatggtttaataatgcatatgttagatattcatttacaaatttctgtaagtttggataattaatttctaatgtattattatataaatataaattagggaaaattgaatcataaccataagtgtcaactattgttattgcatttttcttcgtattttcaacaatgtcagttgattgttttgtagaatcacatacaaaagatatgatcttggacacattagataataattgattaattgattcgattatctgtaatctctcgctcttcaaacataatttataggataacttataatataatgccgaaatctcattaaagaaatcggttaaatggtcgaataaaatatagtcttggtttgaataaaatatatatatatatgaacacaatatgtttaggaaaatatgtatatctctttgcaacgaatttaaatcacttagttcctcattagataaccatatatgcaagggaaaagatgaaggcaaactgacatcaaaatttgaaatattaaatgcttgaaacagagaagagttagattggacattaagattaaaagtaagatcattaatccatttgcgtttattagtagagctattattattattagtagagctattattattattattattattattattattattattattattattattattattattattattattattattattattattattattattattattattattattattatggatacctttcttgtcaaaataaacatatttatatggcacaacgacaatcttcgatctcatatcatttaattgaatatctgaagtattaattagtgaataaatataatccaccggcattcgacttgaatataaataacctctacaccatcttttatcttcagtcaattcaaatatgtaaaccttagagccaacataaacgtcatgatatttaaatttaacttgatcattattatttaattctggatgtttctgcaaagggagaaatgatttaattacagtggcctctatcacgtcatcagttgcgaaccagcgcattttcaacaattatagatagcagatgtcggcatatacattcacttattgaatttgtctactctacaaaaaaataaaagacatctgtacctgataaatagagaaatatatattgtgcatgctcagtcgtatcgtataaacatctttcccttttcctatatctctagctttgtatattcatatcaatatttcttgcgacaattctcaaattgaaatatccgcccttcttttaaaagtgaaaatcctaaaaaaaaaaaaataaaaaattaagaaagaaaaggttttagagcaattttgagtgttaaaacttgtacaatgcaaggtagtagaatagcgtattctataaagtagaagatattctcaccacgatgtataagctatagacgctaacaagcttttcgaaagataagttggagaaacgatatttaattagaaaaaacagagaataaagaaaggacgagtggtagagaagagaaagaaaggaaaaatgtcatcagttataacattcagagcaggtatagctacatacaatgaagacacaaagatgtgtgaaccaaaaccaatgcagggagttatcactatccgtccaagtggacaagatgaagatggggaggatgctgaagtgggggttgaggacgattatggaatgaagttctgggatttccaatggaagacaaaagatcgtacagttaaagaggataaatcgttatgtgaacccatagaactaattttaatacctggagagaccaagtgggttcatgtgaaatcgtgtcctgatgcaagaatgtttgcattaatcttttcttcgaatgagaaatatttcttttggttacaagataagaatctagatggattaaaattgaacgaattgaacgaaaatgatcagattatatttaataagattactgatcttttgaaattaagtttggaggaggatgatgcaaatacaattgaagctagtgattccaatgagaaatctccagaaactgataataataacgataatgacgatgaacaaaacaatgatatcatcatggccaatgcagcagcataaaacaagttctgcgcacactcacatctacatatatctacatacatatacatatgcatatatatatatatacaaataggtaaaacaattatacaaatttaacatcccaatctaattcatgtccagacataaatggtattaaagtaacattaccatccttcgagacaaattcattctcaatcttcgtctttgatttgaataaaatacaattatcattacttgattgaattaaatttggattgatcttataaaattgtaatgggaatttagatacaaacccagacaatttatccaaggagttatgttgtgcaaaaatctctgccaaatattgcaaagcataccgctgagtgaagatcccagctgaaacattgcaatatctctgtttattttgtataggatgtggggcagagtccgagccaaagataaaccatggtttcccagatatggcagcagagattagagcatgctgatctgcaggtaacttagctacaggtttacagaaattgattggattgcttgcccaatcatcgacggtgatccagagatgatgagcggtgatggaaccaacaacacggatatcgtttggatcagcaacattttcgttgattttatttatggtttcgatagcctcttttgtggtagcgtgttcaaggatgatctttaaattggggaaatcgttatgtagtttgagtagagctggtaagaaatgtttctcagcatttaacacagtgatgtcgttttgtgggctggaaggtttttcaccgtgtagattgagcaccaaacctgttctttccataactttaaagataggataaaattgggaaaagtcgtttggatccacatttgaatcacttgaatttgtggtgacaccggcaggataacatttaatcccatgaatcaaatttttttttgcaccttgttcgaccatttgagggtccaatttattggacaagtagagactcataaggaaagtggtctttggagacaaagcttgcaatttttctttatactgacggacttgttctagtgaagtaataggtggttgtagattaggcatgacatagactacagagacacctccatctctaatcatgggtgtcaccaagtcacacatttcaccatctctaagatgaacatgcatatcacaggtcaaccctagtgaaatttctgtggaatcagtcatcgtggtattttgtaaggtgtagtcgtggtttcaattgcagtcgcagccccttaatctggtatttggtattttgctaggtactaaacagcaatatctatccaaacatataccgtaacattaaaccaatacatctatctacgaacagacacaattacataatatataatacataatacataatatatagataatgtatattatataatatcggtaatattaatctataaaaagatagtttaccctgctttcagaaacaaaaaaaaaaaagaaaaagaaaaaacataaaaaaatctcgaacaacaaaaaaaacgtattgggtgtctgggtggatactttgacgtcgttgtcgtccaagatgattcattgtggatgtctgggtgttttatttttttttgtttctgtaaaatctttcgaagaaatttgtttgtggtgcttattttcttctttctattaaatcatgtaagtgaagaaagaaagaggaggtcgagtatctcagatgcgatgcgagagagcgaggagggaggaagaaaggttggaaggaagctgtacggtagacatttgcacatatggcagatctatatacagaactaagatagagtggtgtagagtgaactggagtattgtcaatcaccttttgacaatcatactacccttgatataagcccaactcctctggtattcgaagggagctactgggaaaagacctataaatatgaaatccataagagctaatccgctatcttcacacgttggaagtagaatagtctttactcatactattaatttagctagttcacgtcatcttcatgtttcatttatcaatcactatgcaaggactagattctccccacgtaaaaatgacaaacagaagaaacagaaaaatccatctccaacaacactattccccatcaaaccatcaacaaatttgagagtaaccgatcctatcccgcctactaaggacaatattcagtgttctgagtctcatcctttgtggcaatttttccatgataagcaattcattagatcctccgaccaactggatttgacctcaagagcttggtccatcccagagttgcgcagaaaatcctttaatgatctacattccctttggtacaattgtctgatagagagaaatagattggctagagaaattcatctcattagagctggtctacatacagagatcgattcctttgtcactgtggatgaaagaataagaactaccatgtggagaattagacatgtcttgtctgagagagatattgcttttaagaatgccatatcaaatgatcttgaaagacagaaattgattgatgagttttctaagacattcacacaggtgaatctagattcaaattcaaattctcttgctaaagatcttgagaacgatgattcatgggaaaagttgaaacggttccaattggccgtctttggtatcaatgagattattgaagaaaacaaaactatcgataagaatttcgtacatggtataaaattggtggcaaatctaaaattacaaaaactatcgtcaattgacccaagtattaaggattggtatatcaataaatggggtggtaatcaattaactgatattgctcaatgctttgtggtattttcttgtgaaaatgacgttaaatctactttagatgcctgttctatagttaacgaattgagatcggatccatcaaaattgatacctgaaaataaagagattcaaacagttaaatcttatatccaaaaactgattgaattcaccgatgggtgaagagttttaaaagtttttacttttaataactttttattacttccatgcactcaacaataccaataataatagtaataataaacatggttattttcgtgtacatagtgaatacatactcgtataaatattattaatattttgcaataacaatcatctattagtttaccttattcatttattcatttcttttgaataaatattttgtatttgtaagttcaaattattccattgatttgtgacaatctcgatctcttcttccggacaaatttttaaaagactacttagtatctgcatttgtttggaaataatatttaagtcagcctcgttatcctcacctttacaattaatcatatcattgtccataagtcgatattttgcaacttggaatatagttaaccaataccttcgaccattttcatcctcttctagtaattcgttaacatggctagatgcatatgagaaatcattataaaccaatgaataatcgatatgtaatgataataggtctgtgaaatctgtttccttttcagggcattgtaaacttatcagtattttgttccataatggccatgtgacttctcttatatcgtgacgatagaaatttggattcaattctagtaaaatcctaattatctcaattggacaatctctatattttaatatactattaggagattttgtagttgtgtccgtgaatgatctgtttaccttatctccatccgtaccttgaaatttccattttgatgatatatataaatcacgacacagtgaagtcaattggttaagtctatttgaatatttatgataagtatcatattcatttatatattttagtagagtctctgcatttgagaattctatcgaatttattctgttagcattatggaaatattgccaaaatttatcaactaataaaataacaattttctctatgttattctcatttggcgatattctatcaactgttagtgaaattaaatgaaatttctcaaattgtaaggttgtctctaagactatcttgatgactcgatccatgtcacttttatcactaaaatttattttattaaataatgtgataggctttaataaatccaagactctattttcattgcatctgaatactgtatcacataaatcagtaaattttgtaaattgtgtttctttatcaccatttgagataatgtataaatctattagactgtagttaattattgatgaataatccttcacagactggcaatacattttgatttctttgttagtaatgggatatttacttgatgttgcatcatcatcaatttgattcaaaaaatcgttaacgatttgtcttatatcgataaagctaaccatttctttactattgacaaataatatatccattgttttggattctatttcagataaatctttttcgaatgttatgcttctcaatatttcaaataatttattaagtttttggtactgtaaagggttattgatcaccaatttattttcattataataatcattaagaaacaatttataaaacttattatcatatgtcaaataaggaatcaattcattttctaaaacattagggtcatttgaattaaaccattcaaacatattattttcctgcaatatgacatcttcaaaatcacgaatcttaacctgagtagatagtcttttattgaaatatgagagaggttttacgataccctccatccattggtcaatttctgaattttgcccctttattaaatgccataatggttcataggccaatgtattacttggattagcttcattacatataataacccttttttggaaccaattcaacttatcatctaataatcctagttcattcaatttactattaacataacgttggacttcatcatatcttttatcaatggtttcattgtccatctcaaccatatacaataaatctggacaattagaaatttgtgaaatgataagatcatcattattgttatcattgttattatttttttttatcccaagttcattactatttgagttattcgtttgaaacaaaaatttcaaatttatcgaatcgtctagttcaggccataatactataactaaattaatgaactcttgtgaatcgaaaaatttcctgtatattttactcaaattagttgaatctccgttactggaatgaaaacaagctattaaaaataatttcttgtccatgtctcttatttattttgtaccaacttaaataagatttgatcgcactacttggttgtttattccttacaacaaaaggtgttaatattactacaaaccatctatacatattagtatattttatatattttgaatacgtgggaaaaattcgacattgtagttttgccattttttttatttttttttgaattatcttgtcaatcttcatttacattggtaattttacttagtaataagaaagccagatgaataacaatgataaaatatttggaatattactaattaatatatgatcagaggagacttgttgatacagtattcatgtatatcagttaggatagatatttgataatacatcacatatatactacaaggtatcactaagttgggacaagagttgggttgctttaataataattattactttaataaccttaaacatttatggtagatagatttgaattataaaacaaagctgaaattggcatgtttattttaatggtttttgcttgattaacgttctttgtatcctcctttgtaacaactaagaactttaaggagactaaatgatgaataatcttattccaatttaatacttcaaagatttctttactgtagttatgtgattctttggctcctgccctaggtgtgttatcagaatcaatgatcaatgtttgtagtatattagcaatgaaactgttttctttattattgttaactagttgaatcattttatcatatatttcttcagtttctaagaaataggtcattttctcactaacacataaagagcaactgaataaaaataatttttcaatgtacgacaattttttgtattgttcgtcatcaataattatgtttgtttgatccaatgattttaaaattgcattcaaatctatttccttttcatttggcaaatcggaaagagagaattccttattacttttcaaaaatatgttttgttccttaatgtattcatcaattacataatcactggcgttttcaatgatacgtacggcagatccagcgtcattgttagttaaacatatttttttacatgcttcagttattgttttatcatccatataggtatttattactttagagatgctcttactgttgttactattattattctcttcatccttgttgatttgaattttttcaaatattatatccaaagtttttgtgtcttgatatattttatacttgtaattatctttcaaatttcttaaatggtattcaacaattttagataactctttatcggaataattttcaaatggaatatgatgataatttatctttgaaagaacatgttttcctagagattgtttaattaaatctggattttgtcccacagcaataacaattaatttagaatttggaaaggtagtccaagaaaagaatttgaataataaatttggattttcattacataataaatccaaatcatcaagtacaattattgagtgacgttttctatttttatcaattgatgcaaaaaagaattctaatgaacattcaatagcatcaggacttaaaaactcatctttgtgatcagacaatttatcccaaacatatttatataaactgtcacacatggttctacgattcaatattgcagtattgaaaatagataactctttataatcactagatttctctagttcatgtattagtctattaactattgaggacttaccattgccagatcttccattgatgtaaagtgctttagattcatttttacgtaaagaatcaaatatctctaaatagcatctagcaaactccttcgatctggcgggaagagacacaaaatcctgaataacttgaattattgatttgtcatcactaatatctttttgtttcttcagtgtggagaaaatagttggagttctttggttgttaggaacagttggttttattttagtttctaacgcggctatatctaatgattttaaagtaatattactatcatttgaattttctgaaatattacttgaaaagttttgtgaaggatcttttgaattattttcgaacttggattttaacctggcatatttatctttcaatttgttaaggtcaacagatagttgttttgtttcttgagttgctagttccatagaattgtcaccttgtgtgtgtgttgattctggaattattgattttgatttttctaacggggatgatggttgtggttgagacgtgatcttacgtaatggtgtatcttcctcggaatcagattcagatatgacttttttctgtggcttgtttttagaaagttttctttcttttctttttggcccgtataattcttttcttaaagcactacgcttacgatgaacacgttccaatctttcttcttcttccgaatcaggtaaatgtgaggaagaggaggaggaatcagagaccaattcagcatcatcagcaacaacaaaactgtcctcctcattttctgaaggagaagtgagttcctcttcctttttttcctcttcctctttttccttttcctctttttctgcttcttcttttaatttttgatcaacattagcattagcttcagctttatctttaatttctccagactttgatagcgaggtgtttttattgggataattagaatcactatcagaatcttcagtaaataacttttgttgttgtggttgttgttgtcccattacaggtttattttgagtaattgaggaatttgaagttggtgaagaattttttggcggagtagtcttatttagaataaaagaagctggaacttccgaagaagaccattcatctttgatatctggttctaccaaacgttctttcaattgtaatctactttgagtaacagcatgtgtattggaggaaggggcagaagatgaaggcacttttctactagtactactggaaggtttttctatccttacagtcattttctttaaatgttcttccgaacttttcggttccatcattttgattcttttgacttctttatttatgtccatggaaacaaagctttcagcagtaggttcacatatgtacctaatgaaaaaatctttatcttcagctagtttatcctttgggatcttatcatattcagctttagttacgacgttagcgatatcgatgaaatcctttagccagatttcagacaactcagcagttaagtaaatttcgtttaaattgatccccttgaagaaaatatctttcagttcttcatttgataagccctttttcaacattaacggatcgaattgagtataatatttagtcggattcaattcaaaccatctaagataagagaacgcccagatctcaattagattgttcaaagtgttttgacggatctcgtgtatcaagtatatggagtatgtttttgtcacttcgtcatgcatgacgacactattcccgcgaccgaaacttaacccatcagagattctttgtatgtagacattttctatggcaccaccttttctggatcttcttctagaaccagtagtgatattaccgtgttcatcggtagtgatgacttgccaaccttctagatccttatgtgaggtagccatatgttttgttctgttttgttgtttgtttgtatatatatatatatatatatatatgcgtgtgtgtgtgtttgtgtgtgtgtttgtattaagagcgaagaatagattaaatgaattaatcaattaagtaagtaaatatatatgtgtcctctgttcttgtaaggatagtggggttttactttctttccctatctttttattattattttattccttctttttattttttttatttgcaggtagatacacagggggactcttaaatagaaaatgtttaaaataaagaccaaaggggttaatgtgacctgtatcgactcaagcaatggaaacaaatattattaattatcaatggacggcgtttgagtcggtatttcacgtgcaaatactgagattggtgaaattgatttcatctaaataaccaatcttctacgaattttttggcttttttgtttgtttattcgtgtttcccaaaattattcctcaaacgaagaaaataagaaaaagaaaactcagaatttcaaagaaaaagtgacttttcttttcttttctttttcttgtgtggctgtgagatttcctcgactcaattgacgtgggcaaaatagcaggaaaaaaaataatcgaaactgaaactgaaactgaagctggaactgaaagaaagaggtaaataatagaagatcgaaacagttttgggcagcgagaaggaagatgcatttggaaaagagaaagggaaagagagaaaaaaaaaagaaagagaatagcgagtatggttatgttagatatttgtcttcataagaacgatatcatatattatcaatggggaagtgtttttttttttatttttgattaaaatatactaagtcttcaatatcaagaatatcagataaaacgatagaactatagagttttgtttgttcatttgttttaatatttattttttttttattctttttctttttctttttttcatgtatcttatgtgtgaattggattaaaggttaccataaagttgaagacgttatttctcctggacttatttattttgttaaacatacatcgtaattctttttggatttttttttcttctgttcttttctttatttattctttcaaatttgtgttctaacgtgttcttaaatgaattttaaattgatctgttccaaaatcaaaaaacgtctcctgttgccgttccaggatctaaatgatttggaaagactagttcagagtatccgattactttcaagtataatgcttattatcttcggattgattattaccactgtaccgtattacaaaccacaaagtatatatataggacgattgagtacattaaaggctgatatcgcaaagggggtcttcactgtattgaagcaaagtattgaatccagtggaaccacagatacaactaatggggtcggtttaacaacgtctgaaattttggttttgacctcttataccttcgaagaagttcatggcgtgcctgcatacattcttgtcactctctatggtagttgtgatgtgaaatatagtgatagtaacgatgatggtagcagtaatagcagtagtagtagtgctactaccactactactacagaggactatagtccaatttcactaaatgcttgggatgctaagaatagcacaaaattggtgtttgattgtacatatcaaggacccgattatctttttgattataaaactactctttctagtgtgggattggatatcgttttagaatatgcctatggttcatattctacaggtagaaataatgggaaaccatcttatgatttctatatgcagcgcctgtcaatgttgaaacaacatgtattaaagctttttttcgcggtattgggtgttcaagttattttcatatttttatcattgtggtattattatataaagggtagaagactaaacgagtttccagaaaagtttcttttacacttactttcatttttatcgttatttgtatttattgccggtatgattagtacaatatgtttactttggattaactattcaatgcaaagaaaaatcacaaaagaactacaagcctttggattttcctaccatataggggttggttgggtcacatgtatgatattctgggttttcttttctggtgtatcatgtcttgtttggtctggtttagagtggtgtgttacttcaaataattcttcgatagatgattatgaagatgagattcttgttaattcacaccaaataaataaatttactgacaataacaacgataatgatttggagttgaaagacaaacaaagtggtagtttaagagttttatccattgataggaatatcgatgattccaatatgtcaatttcatctgtttccgcatttgtttcaaattctgatatcaataggagtaacaataggacacaacagaggtacatgaatagtactgcgaacaacgacgataccgatgaaaatgataacggttttacatatgaactgcaaagtattgaatttagatctagtgatgattctgactttcaacgacataatttcagtgggtttaatagtgatgatgcatatgatgaggaccattacagcattcaaaggatggttatcccatcctcttctattcaattttaatatcttataaaagaacttacatgtatagatatgtcttgtgtatgtatttgcatgtatatatatattcttttcgatacccctcatgtatacgtacctataaaaataatgatagactgcttttttgaataagaattattagatcgttcagcagataatgttgtgtcatatccctgtctattcgtacaggtacatatatatagttgacattacttcattcttcatattagtgaaagtggttgtatatccatttttctaagataagttattgaatttaatataaaagttaagttgaaaaaggaagacagtgacggcgcttaaaaagacaactttcaatactaagtcagaaagaacatagatattcactgtttaattaaacaatacttgatagcaaatatagaagaataaaaaaataggattattatggaatcattgacaaatactaaagaacattcaaatccaccgaaagaacaggaagatggcgttgctaaaaccttgcaagttgctcataatttagagtcatcttttttaaaagattggcaaagcgatactcatgtctctgaagtacaagaattgattaaagcacacaaaactataaagaacatagaaaagatgacgcattctattagggatttatttcaagaatgtaagggtgatcgtgataattctatgtgtctcacagtcgagaaaatggaatgggaaactctccatgatgtagcttccatgattatacaggaatacacaagtaaagttgatcaaattatgatgaagttaaatgatctaagtcgacagattatgttatggcaagaagcagcatttattatggattcccatagaggaataggccaggtaagtgagtgtcaggattggataactttaaaagaaatatacttagattacaagcataaagttcttaacgattcaattaatgaaataaagaatactgtggcaagactacccaataattagtaaaaagaaggtcgacacttgtgccttcttttttttttttagtaatatttcggacttattcacgtccttgtctaaaataattaaaaagaacataatattaaagaagattaacttagtggttatttatcccttctttctttcaattttatgaacccttttcagtgtacctatagatttttattattagcaatacagggaaattaattaagaatattcattttgctcaaaatttttacagccagtttagcttcaatatttctatcataaataaataaaaaaaaagagagaaagaaaaaaaaataaacaaatgaaataaaattgaaaatatacttgatcaaaatgatttgaatttcctctttcggaatacttattgaatgtagtttagagattgatacaatcttgaaaaggaatcgaaggaaaacgttgtcgtgatgattgaaggcacaggttctattaaaaacgtaccaaaaatacttttatataggtcaatttgtcctcaataatagagtagtactatctacgttttcaatatcaatttaaatggttatctgaggtatctgttctctttttttagatattaatacaacgtttaatcatattttttgtaggatatcagtaagataagactttttaattaatagtacaatttgtcatgcggtattcggaaaggaagaaacaagaatttttatctgatttggagtcaaaattaatcccaaaggactcgttggatctgataatagatgaatttaagaatgaattaaaagagagattattatatagtaacaattctatgttaccaacattcctaaaaaaaacttctaattcagtattttataatcatgcctgtgataaaattatattggctattgattttggtggtactaatttaaaatttgctcttttcaaatcttatccgacatatgctattcaatattcaaatataatggaaattgaaaataaattggtgaatatatcattttttgataatattgttaaaaatgttgttttgcaattaaatgattattgtttaactaattgccataactttgaatcagactcaagaagagacatatttgtaagtattacattttcttttccattgaaccaaaacaacgaaattactgttatggggaaaacttttgtattgacagatgaaattaaaggtcaacctattgacattatattacaagaatcatttgataagtatagtacaagtcttatgaatgataaattcaaattttggattaataaaaacattattaacgattctattgcagttcatttaacaaataaatacagtaagggatatgaaaatgaaattgtaacaaatgaaaggaatgaagatgataaaatgatatctttgattttaggtactgggttaaatgtatgttttgaagttccttttacaagtttgccagattttaaaaaaattgctatggaggagatctacgagagtatgaaagatgacgttattataaatagtgaaattggtttcttgggttctgatatcattcaattaaatccaaattttgatatagtttcaattttagaggtgccaatgccattagaaaatattacagcaggggatgcattacctaaaattttaaaacgtgtattagaattttatcagatttatcctgaaatgacaataaattttgatggtaaaattttctgtcaattactagatgatcaagatattaagagtatgattagtggtattgatatcgagttcataaggcaaattgccttgattattataaaaagggcatctatatatcttgtagctgcaatatatgccatccatgattttattcatttagattgtgctttaaaaaatgataaaacaattaaaattggatatgttggatcatttcttgcttactgtaagacgtatcaagatatgattgatcaatattcatgtggaaaaattcaattgcaatttttaccagatagtagcttgatcggtgctgctattattggaggaaaattttaatttacaaggtggtatagtagactttatttttgatattaaaaccaaaaaaaatgacagaagtaattaactgttgagatttcaatggtcaataaaacctatttgtgggactttgctgctaagatacttagatatataattatatgaaatcaatattctttttagagatataatataatataatatgatcagaatcctttgcaatatatatattatatatgtgtgtatgtatgtatgttaagaatgattatctgactattccattcagcacacagatatataattagttattctatctctttgattttgtgcaatacattcagctatccaagtaatatttctgatttcttgttcctttgatttcatccatgcccatatagttgaaatagtgaactgttgtgtgaatgcatccttacaaagttccatttccatcctatagaaatgatcttccaactcaccactgtcgtcatctaagatagtcttataatcatagacatagtttaatgcagaacgtaaactttcgaagtctttggcttctgctaatagatgggtagctattggataacatttgcctacagatggcatcaactgcaatttcaaagcagagtcgaggacatcatcattatcggcggctccgttcctgttatggccaggagaggttgaagatgtgtttatggtttgcagggaattcaatgcaatatttattgttctcctatcggcttcaaactctaatagctgcaccatgatatcggaagcgggattaggtagacaggtcttgacaaaactgataaaatcttctaaatatgctttatacagtttgtttctaatgatttcgatatttagatcgttcaactcgtctgcgttatcaaaacagtcttgaaaatatggagccaggggagtatctatcaggacagtctcgtaaagagattccagatctgtggctacggatagggtgggtagagtgtcgaaccaaccaagaggatggcatctgtttaagatctctgctttattacgggagtggattgtgccagtgatcatgagagtcacgttatcgatcatgtaactgtaggtgatataatccatgaattttttgctggtgcccgacaattggtcccttagatagttaaattctttgtatagcttttcggatgccatagactgaataattgaagtagttagtgagtcctgtgagacgttggtgagaaagttcccgtagtctgtagaggatagttgcaattttaggtcttctaaagtttcacattgagtcaaatttaaatactgattggaggtaagcaatccatttctatagcctctgacaataccttccacataaccgttatctatattgaaatataaaccttccattgaaacaataaaaaatagaaatgtatatataaaaaaaataaaaataaaaatcgtagcaataataataatgatatttaagttgagtacttcttatctttctaataaaacggattccaaaaaaagcttcccagtatataaatttgatcaatcagaagtactaatatcttgcgggattatttgctttatcctattactctagcttatattagtgtatcagcctattcatccattcaactatccatctctttattaatctatctctctatctccaaaatgcctttattgaagggaggattgatggaaggaaatggttgtggagaatttcgtctcgaatggagaaggccattcaaaaacaaagaaatgcgtatttcctgtttgggattgcgtcaaaaaaaaaaaaaaaaaaaaaaaaaaaagaaaagaaaaattttcaattgttcggggagggtaacctgatgaaatttgccagatctgcaaagttacaaattttcttgaacaaagaaattgatctttagaactggagattattactgaaacttgaccttattgtatgagtatgtgcatgtgggtgtgtatgtgtgtgcggtgattagcagatcttagacctttctttcattttatgttttcgcatcttgttttttttttgcatttatgtgtccagatcttgtttgacggtttttccatctttcttcttgtactgttagtttctattctgcttggcctgctattcttgaccaatctccaaacgggaaagggggactagtaatactgtacttagggttatagaaatatatacacgcatatacgcgtacatacatatcgaaggttcgtgtttatctatctaactgtttaaatacatacaaagatttatatattcagaataataattagaacgaagcgtgtattgtcttaattgggtgcaccatggcagagaacaatgaggtcaaggtccctctcgttgaacaagtcctagctataactgtggagaagaaggagaagaagaagaagaagccaaaaaagaaagagacaagggctgcagaaaccgccactgaaatggaaaaggaaactaaggttgttgttgaaggtgaggctggcgaagtgaaaaacaaaaagtcaaagaagaagagtaagaagccaaagagtagtaatgacgaaaaagcttcttcttcttcaattactactactggtagtagcggtccagaattgggtattaaaactgaaactgacacttcagaaaagaaagaaaagaaacttaaaaagactaagaaatctaagaaagaaaagactagtaaagatggtgaaactagtgtagtagaaacttctgacgctactattaaaggtgagccagaaaaaaaagaaaagaagaagtctaagaagtctaagaaggtcaagacaactgattccactaatactactagtagtattgataatgacgatgaaacaaaaaagaagagtttgaagagaaaagataacaaagaaaagaagaaatcgaaaaagaaggataccaaagaaaagaaatctaaagaagcttcaagagaaccctctttggctatccctacttccgatgatgttcctgaaatcccaattgacactagtgcttcagccccaactgaagcatctccgtctgttggtaaattaggaacggttactgtaaataatattccacacactacaacagtatttgatttaactcacattaaaggtaccgaagaagcccctattgaaactaagaatgatttcaagatacattcccgtgttgattacggtacaaagggtactaaagttgacgtcttaacaaaccatgtatgtttaacagtaggtgacgatgttagtggtcataaaaactctgaattggatccatggtggaaatctgccttcatttacatctatcacatagatttcaaaccaaatggaaaactaggaaaaggtgggaaaggaggtcgcggtaaatctgttccacctcctgccccactatctaaatcaaagaaatatgaattagtcgaagctttattccatgaagatgagacgttatataaatacaaagatcgtatcgcctttaatggtgaagagactttgtattcacacattccactagaagaattcactttgttcgatggttgctgggatatttcaaacaaacagaagaagaagaagacttctattgaaggtttaaataacaactctaaagaagaaatgaacgaattagtttctcaagtcacattgaaattcgtctctaaaattggtttatcagcaatttataaagataccttaggtaaaaatccagaagatcaggaaaataaaatgtctgcaccagataaaactgtcttactatctttattaggtgtcaaattcctacagtcaaccgatccaatcttccaagtccatggtaataaattttttgtttataatcaatatgctaaggctattcctttccaaattggtgcttatttgattcatggtttcactgtgtctttaagatattcatatggttctgttttattaaataccgttaatgttgctctgccattctataaacataccaaatacttaccaggggatccaaaattcaatgaaaataatgaaaccccatacactttaatggattggatccttgagtgttatgatcaggttaatgctcagcataatggtggtaaaccacaaaagggtaaaccttctgaaaaggatatcaatttctttattaaaaagaatagagatatcaaaaatctaataaaaggcttaaaatgttacaggccttacattaattattctgttaacccagacggcacaccaaaaccaccaaagaaaatgcaatctaaaggtattgttggttttgctagagagacagctacttctatgaaatttaaaattttgccaagtgatgttgctaatcaatcaccagttcccggtgaaaaggaaattatgatagatactaatgactattttgctaaaaaatataatattaaattgaaatacccaggtgttaaattagtttctttaggcggttccaatgtagttccagcagaatgtttgactattgttccaggtcaaaagttaaggggaagagtttatgatgaaaaggctgttattgatttcactgctttaagaccagatgaaaaatttagagccatttctagattagctttaccatctattaaaagggctttgagtggtgatgaagaaaacgttgtagctccacacgattctgattacagtttcttaaaggttccatctcgtgttgttgacgctccaacaattcaattccagactacacaaattaaatatgaagacaaaccatatggtactaaagtgccaaactctaaagctgaatcacaagagaccaaaggtaactggaatttacaaggtcatcaattcatacaatcaccaagtgaggaattgactttaagggctatctttattaacgattccaatagagcaccacctgtctctatcatggaagatgctaagaaatcgttgaacaaatttgcctctgatgttgcttctgttggtgtgaagtttaatgtatcccctcaacttattttgatcaatgaattcgactctccagttaagaaagttgttggcggtcgtggcggccgtggtggtcgtggtggtcgcagtagccgtggccaaatatcttgggagattacgcctggtgaagaaaaattggttgaattgttatcaaacgttccaccaaagagttatattcttttcatcttaaacaagcctaatcaagatactgtttacaatagattgaaatacttagctgacttgaaattcggtgttgttaactcatgtgttgtttggaataatttcagaaagaactctattcaatacaatatcaatgttgtcatgaagatgaatttgaaattggaaggcatcaatcactccttatcgagtgaagacttaaaaccattaaaggatgaggaaactggtttaccgttcatggttctaggtgcagatgtcactcactatccagaaaaggaacaaaactctattgcagctcttgttggttcatttgatgataaatttgctcaatatcctggtaactatattttacaggatggtccaggtgaagaaacaatttccagaatcggtagtatggtctatgatagattaagaatttaccatgcatataacaatggtaaattaccaccaaagattttattttatagagatggtacctccgaatctcaattccaggatattgttaaagtggaagttaaagatattaaagaggctttacgaaaggcaggttcacaattattaaatggtgccaaatatgatccacctgttactgctatttctgttgttaaaagaaatcaagttagatttatgccattgtataagaatgctatcaatgaaaagggtgaaacttctgcagtccagtctatgggcaacgttatgccaggtacggttgtagatagaggtattacttcctctgcacactttgacttctttttacaatctcaacaagccttgaaaggtactggtgttccatgtcactattggtgtatttatgatgaaaaccaatttaattctgatttcctacaacaagttacacatgctttatgttatatgttcggtagatctagtacaagtattaaggttgcatctccagtgtattatgctgatatcttgtgtgaacgtgccgctgcattctttaaagctaactataatgttgttaagtttgaacacgataagagtaagaagaataggactgatccaatcccacctactaaattattaccagtagtcaatgacaaggttaaggatataatgtactacatttagataaatacttattactgtttgtctttactgttgaaattttttttttgtgttccctattttcctgagttttaaattttattggttttggttgtatttcatgtatcccgtgtgttttaaatattttactatgtatgttattcttttatattatgtaagtatgttactttaattttcatatttgttatattataaagttgactagactaaaaaaactgaagatctttgtttctatatctattcttcataagcttatcatagtagagatagacccaactatttatattttttgtgaacaaagaagaacaatagcaacagtaattccgtatactagcgagaatagaataaacaaaacaaatataggaagaaaaaggattaagaatggcaggtattacagactctttgagactatttcctgtttctaactagaattacaaaaaaccatacttgtagtgttaattggagtgataataaaaatgacgcttgtaatagaaaaatagtgcaaatgatttcttagtattaattttccttattctgattttttcaattaggtcattttcttttttttacacttttttccatttttcccttagggttttatacacagatttagggctctatttctttttttgcataaatttatcttctttttcctaaatgggaaatttctggagccttgcacttatacttccaaaaagggaaattttttgtcgatgcttgcagaaaacaaaagaaaaacaaaagaaaaaggaagaagcctggagaaaaaaaaatttttttttctttctttttctttctcctcaatttgttttcctctgtgtatgtgtgtgcatcgcagtgttagaatgagaagaggggaaacaaggcatcgttactatttaaagtagttatatgtatggagtgccagattagagcttggtggtacagattgtactttttaatggttaccagcttatttacctttcatgtaatcattgtagaatatttataatcctggttatttaattttcttttttagttttttttatttttttcaatcctcatattaatagttattaggttatttcattagagtatattagtacaatcgagaaactctgtaaaaagaggaaaacaaatattattagatataacattctgtcagtacaaaaatgtccgatttattacctttagctacctatacattgaatgttgaaccatatgatccgactcctgctatcagttttgacaagccggtgactgtccgtattactatggctgccattgatcctgaaccattcgatgatgaggagaagccatccactttaagaatgattaagagaaatccagattttgatgactctgaagaagatgaaagtgatatcgattttaatgaagaaggagatgatgatgatgatgatgatgatgatgatgatgatgatgatgatgatgatgaacaaaaagaagaagaagaagaggaagaagaagaagaaaataacaaaaagaaaaaggaacaccaccatcaccatcaccatcatcaccatcatcacaagcacaaacacgacaaagaagatgaagagtcaaatgaagaagaagtgaaggaaggttccgatgatgaagaaactccaagtgatgacgatgaatttgaagaaactgttcttttgactttatctccaaagactgcatatcaacaggctatagatatcactattgctccagaagaagacgtacaatttgttgtcactgggtcctatactatttctttaactggtaactacgtgaaacatccattcgattctattatgaatgaagatgaatacgatgatggtttgatcccagaagatagtgaagaggaatatgatgatgatgaattaagcgaagaggatttgagtgatgaactggacaacttagaagatgctagtgacattgaaggtcgtatcgaagaattagttgcggaagatgaagccaagaaggaaagtaagaagagaaaggctgacgaagaagaagaggaggaggaggaggaagaagaagaagctgaagtcgaaatagaagaagaaccaaagccaaaaaaagctaagaaggaaaagactaagaagcaaactgaacaagaaaagaaggttcaaaagaaagttgaatttaagaaagagctagaagaaggtccaaccaagaagaaacaggaaaagaagccaaaggctcaagttttacaaggtggtattattattgaagatcgtaccattggtaaaggtcctcaagctaagaaaggttccagaattggtatgagatacatcggtaaattaaagaatggtaaaatttttgataaaaacactagtggtaaaccatttgtcttcaaattaggacatggtgaagtcatcaaaggttgggatatcggtgttgctggtatggctgttggcggtgaacgtagaattatcatcccagctccatatgcctatggtaaacaagctttaccaggtattccagctaactctgaattgacttttgatgttaaattagtttctatgaaataattaacaacatattgattggattcataatatctttttattatatattattttattatatattaatatattactcagaactacatatatttgacactaaaagaggaggaagtaaaatgaataaaacctcccctttagcaaaatctaagtgaacgattattatatatatatatgttttattcattagatggaagttactagaagatcattttactggcagattaagacctttttttcgtattagagtgtttaacttagaatcaaatgttatatttaggtattatccaattttagtacttttattatatatgaaacaacttttatacatatatatataaatgatataattgatgatatgagtatttttttaacaaataaataaacaaaggggattaaaatttatttcataaagactatttagtactggtacatatttctgtgttgacaaagtcttggtagatttgaggaaagttcaaatttgatatactttaatatatatattaaaacattctattcaattgtctgcacatatcaattattctctttcttttctttttcataatagcttgtttcataataaaagactaacaattattgttgctattagttaatttaagcaaattatttataaaaagatccaatgaaatggtgagttgaaagaagatagttttttatacattaattactaaacaactaaataagtgaatagattatgaatgaaacataaactgacttctcaataatatagaaactcgatttaatattaaatgggttgttctatctaacaagattctcagttatatacgcctttcaagttattattacttctttattattatcttcaatccccatttatttttaatttaatatgttatttaagaatgaaatacagttttaagtagatataaataagcatatatattaataactatatataaacattagtactattttattatggcataaatttttcatcgaaccgtttatatttttaagtcagtgaaatcagttcataatagatctggcattattcacttgtagcaacaaagcatttacctgttctagaagattttctctatctaattcagtaatagcctcatgtatacttggaagtataactccctcaatacctgtacttttatttgatgcaaataaagaatgcttaaaccaaggtcgccccaatagtccagttttgctaaggaacatagcatctaattgtttcaatttatcatttgctcttaataacctcaaatataactttaattttgtcagaaaggaccatattggatagtcttgcttacattgcatggatatttcataattttttctatcaaatattctactatgacgccatgccaaagcaaaaatctccctttccaatgaaacagccataatatgtaactgtttatcatgtgggaacatcttaagtatttgtccatacagtctttcatattcaccataaatgactttgaaatagttatgtgtcttgaacatatgaagttcattctcactgagcattaaagcaattaagcctaccatagatgccatattgctgtgcagttcaaaatttggatctacatatgtagcaaggaaatccatattatcatataatgaatgggtcactgttactggatcatctttcgaagagtttctttgaaaactaaaactagcagacggaatagctaaatgatactggaatggcacatagtcagacgtgccatcaagtagtttaaatttactatttgaattcattttccattcatcatacaaagttacatcatctagtcctttaaaatttataaattttgaggcgtatctgattatgtggtgtagcaatggattcgatttacaagtgaaagaagaacctgctatagcattattatccaaatttaaatacgcaagggcagactttcctagattgtaaccatgttcatcaataaattcggttgaacctattagtccattattttctccatcccaaataattaatttaataggcctcaaaggtttccaaccttcatctaagaggtacttaaatcctcttgctatttctaataaaatggcattatttgaggcagtcgtagcacatattatggatgatgtagagtctctacttgctccaataatgatttctccatgttgaaatatcccaggaatttgtaatataatgttacgtatttcaacaattgaagtattttgtttattaactaattgtataactgttttgttagttgatggacctgatgagtaatcgaaattttggatattaccattctctctccattgaattccagtattatttatttgctgtagaattggtgtaatatctttgacacttaatggaatagatgggattcttggtaatttcccaacaggtgacagtctttcagtgtaagggtacttagatggataattgggagttgttggatcaccggggaaatctgtataatattcgactgtggcacgttcaatggcacttggatttctagctggtccatctgggaacggtagataaccatttttagtagttacaaaaccgtcatctactggatcattgaaaaaaattacacttgttgcaccatatagttcagcatttctaacttttaagccactattcaaatagccatatttaattatatggatctttccctcaatatcaatattgttatcaattaaaaatttatagtcatttaaagtaccataattacaataaacaaactgagatgtaacattcccatttggtgcaaatgaattaaacccctttaatgtgtttagttgggttttattgaatacagtatcttcaatcaaagtggcattccagataattttgtcattttgaattaatttcacctgagtatctacaggattactgatccagggataataattttcaaaatacggcgaaaaccccatattttttaaggtatcaataagatatttatcataagttaaagcgttcccagatttagttaaattactaatgtgattttctgctagattttcttcctgcaaattgtttaaaaatatcctgtagacttcagctgtagtaaattttgatgaatgccatctcctaagatctcttgaaagggatgttcttggagcaaataatgtcaagaacccaagatatatggtcaaactgatgaaaattaagattataaatttttttttatccatatgttcttttattatttgatattcacttattattgaggagattgtgttgctacgtggacgtatccaattttgcacctgatctatatggtttgtcaaattcatatcattgttgttatagttattggtggttgtagtagtagaggtactatggttatcatttaatttagtggatgattcctgagaggaatagttagtagagaagtgagatgaagataataagggtgtatcgtacgaattctggggctcatcaggaatattgttgttattattatttggtaagtcatccattctaaatcgattctaatagcatggatatatatgtgagtgtttggataaatagattatcaaatcatgcatttcaatatttataccctatttacagataaatacataaataaatacataaataaggtatctgagccggtggccgttattgttagttttgttattgataaagattacggataataaagtgacttaactttgattgattgacttttatgatattgttactaagggagaaaatattaagaaaaacactccgttatcataataccagtggattgttatggtcagtgagatatacaaatcgcatagatgggacagaaagatttcccacgaatatatatggataatattgataattgagggtggataaagacaagacaagatacaatggtctttaataggatctaaaaagatcaagaaaagaaactaatcaagtctgcaaaacagttaaaaaacaaaaaataaaaataaaaaagaacatttggtatgttcaccatggttttctgtgttatagcaagccattttatattatgtaaccggttggttcattttattttacttggtttacaatttgtataacaatattcactgaaatgtggtgaaacttactatttaccacgaacaaggcctctctttcaaacgatttaggaagcagatcacagaagagttcggtaatgggtgtgtaaattaataccgccatcattccgtaaatcttctgcattgccagccatgtgaccaatggaaaaacaaaaaatataaagataaaaaaacgtgtcacgtgatttagtaattggctgcaaaaagaaaaaatgaaacggacaggaattgaacctgcaacccttcgattgcaatctttccacttgaaccaggaattaactggagtcgaaagctctaccattgagccaccgcttcatcttcgaatgcttggtgttctatggtgatatataatgattgtatttcttaggttttctaaaaagttttttaattaaaaattcaatttaattaacctaaactaacaaaacctatagtaacaaattattatttaatattttatgatgatgtatatctcttagaaagtattggatttaatatttatattcatcatggtcttagcgttaagtaaattgaatatcttgtttattaaaaatactaggcaatgaatatgtataagcatacatatattatatatataaaaataaaaccaatgatctactaaaaattttcttgaatgaagaaaactagtgagcatattttcttttttctaaaaataaaaaaagtatgatacccattgtaagaagatattttaaagatgtcgttaattgtgctaattttatatagtgtattcattacatatatatttcttcaaatttattaaaatataattcagactttagagaagtcagctgtacgatattattcttctctggcttctcttgagaaaataaatttttataaaaaatattttatttatatatagataagggtattcaatgaagatacacttattttttgaatgctatttttgacgttgggcattaaaataagtaagggttgtcagttaataaaaaattaagatttatgtaaaaaatcagctcatataatagtaactaattttatagtcaaaaacataaactttatctaaagtatgactacactgagttttaaaagaagtctaactcttgaaaggtttttttatacagaattaatattcttatttaatatatatagaaaaaatttgtaaaactggctatttctttttatattttttttttctctatgttgaaatttaaaaggtgtggagtaataacctataagttataacggaactctatgaaccgtatttttataagtaatcgctcacagtattaaataatacatatattatatacaaaactatgtatgacgtatataaagttgtgagtaaaagaaattatttcttgtcgggaatgagcgcctttattcattggatatatagtaaatattctcaatattatattaaacagatttaatatacaaaattataataaagttcttccctttctttctctatatacaacatagaaataataatatacaaagattgtaaataagataaaaataatgtatgacgaaatccttggctttatatatgttaacattaagccattttcctctacgaacagtaagatatttaataaacaaactcaacaacttttggtgacctttcaacaattattactcaacaatttatcgtttagtgtctgctaaaatcttattgttctatctattttattatagaacattctatttcaacatttctaatttctatatcttgactatttatatttttcagaaagttaattttgagaaaaaaaagtttttcacaaaattttcattgagtctgcgtaatatctcaacactttaagtcttgaaatataattttatttttggaataatcaatttactctcagatatttattaatcagtatatcctttgttgatgttcacggtgttgtttgtttccgattattattttgataacaaattcatatatatttcaatattttgaacagtttaataattttttttaatggagagtaccatgtctattattactattttcatttgtttattttctgatattcaacttttgttaaaaaaaatgtaatttcataaaatttaaatgaattttggggaaaaaataattaaaaaatttggcaactccctttttacaacagatatttgatcatttaaaatcagtgcctgtatttatggaataacgaagatatattgtaaagaaaaaaatttttaaattaaaattctctcttgggaattttgtagtttggtttataacaatatatagttgtaataagtaaaagacaacatttccaaaatattaagttcatcttcttttgattcaaatgttttatttaatttttacaaaatacaaatgaaaaaaaaaaaaacagataaatcagaaaactgatacaaaacccggctatgtttagtacttaggaaaaatatctaataatatttttttttgcaaaagaaaattgacagaaaaattacataaaaaatctttttctttttttgtatgacatccttaatatcaatattcctatattctttttttttttttaaatatagcaactgatgagaatgagcacctgtagtcattgaatatatagtaaacattctcaatattatactaaatagatttagtatacaaaattataataaagttcttcggtttttttatttatatatataatttataatgataatgtataaaagatgaacaaggggagaaacataatatgaaaaaaatgttggctctatatattttcatatctggcctatctcgtctacgtacaacatcaaattattgataaggtttgtttacatctattgataagcaaacaatacattctccactttttccttatcgattaatatttattaaaatctagttggcctattattaattctggaacgttcaatttcagaagtaaccattttattttcaaggtgaataaatttttgtattacaaaataatatcaaaatcagtgaaaaattaactattgcaatactattatatgttcatttatatacatatacttgataaatatctacttgatgtacttgataaacatattaacagttaggtaactttccataatatatttttaacaagaacaaagatcttagtttaaagcaaaataaaaaatttagcatctaaggagagtctaatattttcaagatttattacacactaattttttaattttatattttatagtttgcatgtgatttacatatacatttgaaaatataccagaagaaataaattaaaaaaaaaacactcaactctaccctattttcaatatgctatataataagtaaagatatccatataaatagacaattttctcaatgtatagcgtcatttctttaagaactttgtatgttccttgcaaaaaaactagaacaaaaaagaaacgcaaaacttagttgtatctagatgtgtgtcttataaggcaaaaatattcctgttaagtacggtctaaaaaatgagaacaagtaggaaaaaaaaggagagaagacatagctttattcaaattaattgtatctaaacaaacacggcaaaattctaacagatcttaacaaaacatttcccacacttgatctttcttcctttgattcttctttcccttccaattcatggcaaaattattttacaaagtaactatgactattaataactaaaagactggctcactgtctttattagtcatttattcaaaaacacatatgatctttgcttttacatttcagactccctttttgttcacttctatttaataaagaaacaattcaaagacaaaacaaaacaacagcagcaagaaacagaagtttgcagtctagcatacttcaacaaagaatactcatttctttgcaaaagtagtcagctctcttatcaataaatagcacatctacactataattgaattgattattttttttttcctattagatgtatctaaccctaaaatacccttttacatttttttttcttgtcatcaagaaaaaaaagaaagtttttcttttttccgtgagggtaatatagttgctttgccatgaagaaaaaatggaagatatataaacaaagtacaaattctttctttcatccattagatccttttcactctgcttgcagacttggggtcttcctcacaagacttcttgttcttcttttgacgatggtatctcttctttttcatacctcttttcttgctcagtttgaagaagaccaactttgtccaaatgttttcccttgcaatagacagtacgattaaagagtatatttatgttcacttctttattcgtgatatgcaatgattttaaatggggaaagatcaattataattgttattaagtcaactttataagaactcgtgtggaattactcgtgtacgttttgtacatcttcatgatactcgagtgtcagaggtcgactacagctgtattttctttctctctctttctctctctaagtatatacgttgtaagttgatttacaaagtgaaaaatctggtttccgcttttttattttgttgtttaacgttgtgttattctatatatatggattggagcaatcagctctctgtataaaagattttccatatcttggataattgaggtgtcgttttcactaacacatgtggtatttagtccgtttctattgcattcctctagaaactgattgatggtctcttcacttcgaattgtgcatgagattaatatctcttgacagcttttaagtctcaaacaagatttgatacagcggcataatgccacaaaacttgttgagtcgtacgtaatatctgcaccgactaataatgtcacatcctctggaatatttttatcttcatcccaaactaacctttgccttataatcttattaccatcattactatcattatcattattattagaaagattactgatcccgttcaaacttaagtttcttaataaagaaccttctaatagatttgaatcgccatctgtaatatatatcttacagttcccctttaaccatttatatagaaatatagacactaatccggttcctgcgcccaattctaagatacattgtttgtacaaattcataggacccatcctatataaatataaacataggtagatggcagcttcccacgtacggaaccctgtagtactcaaagaactaatcaatctgggtttttcccataacctaattcccacctccgaaccaattgaatacagaatcacatcttcataatcacctgcttgtggaggttgacagtgtaataatggcaaatattcttcatatacccattcatcctccggtgtaatcgtgtccaagatctttttcaagaccgtcctgacatagtacgcattgtagcgctttatatccatcaattctttgtgtagtaatggatacttagatagatctttgtcaaaatccaattgtttaacagggcatctactctttagtctattatacaattctctttcatccatagtttgttgagagctctttttattcactcataacacttctttatatgtctctttcttaaaaccaacataaaaataaactcccctcaaatacaaacccaaatactggtagtctaaccaccaataatatactgtgtttgcagttcgagatgaccttagatctgtcttcttttcttattttcatttttttcatttttttcattttttttttgatcttagtaaaatgagccttccattgatcaaaaatgagagatattgtgatgactcgatgaacaagcaaacacgtttaaatacaacaacgtctattcacatcactattgatatgggtactcttgttatcgacgtacgtagcaaataactactattacaactactattactactttacatataataagaaataactatgcctagattagtacctttgatagttctctttgtgtcgagtttagcatattattattattattctaattttgtaaaaccaaaccgaacaaatatcgacccaaaattccgtagtgaacaaattgaaaatgtcattatacagacctggactgactataagttgaatggttggggaaaagatatctatcacccaattaatcatagaacatctagaaatatgccaatttctggtgagcccttaggctggattattattgatgccttggacacattgttatatgtacattcttattccaagaatcaaacaattaaggagaatatgcaacaggagatagaaaatgttgctgattggtgtattaatacattgaattatgatatcgatacaaatgtgaatatatttgaaaccactattagaatgttaggtggattattatcatcgtattatctcacagaaacaacatacagtcacaataatcgtagtacgaataataacaacacgttagattccaaaatattcttagaaaaagcaattgatttagctgatagattaattccagccttcaatcaatctgccacaggcatcccctattctagcgtcaacttacattctggcgatgcaaaacggaatcgtgcagatatgggtacatcctcaacagcagaatttaccactttacaattagaattcaaatatttatctatattaactggggatgataaatattggaaatatactgaatctgtctatgaacctttgtatacgaataataatttgatcgatttatatgattctttaatccctatttacacatttcctaataccggtaaattctatacaagaaacattcgaatgggttccagaggtgattcattctacgaatatttgttgaaacaatatttattcacacatgaaactttgtactatcagttgtatcgaaaagcaatggacgggatgaaacgtcatcttttacgtcaatcatctcccaataggcttgtatatatcgctgagagaccattcggtttaaataatatccattcgtctaaaatggatcatctggtctgtttcatgggtggtctattagctatgggtgccactgagggaataaccatcagtaaagcacgtaccatggattggtggaattatgaaagggaacaagattggctattagcgcaagaattaacatacacatgttaccaaatgtataaacagacaccaacagggctagctccagagattgtggtattcaacgaccctgaatcagcggaggcacgccgatttaatcctaagaacacaaattggtggatttcaccaacaaaagattttgctattaaaccattagatgcacataacctacaaagaccagagacagttgaatctataatgatactgtatcatatcactaaagataaaaaataccgccaatggggagcagaaatcttagacagttttatcaaacacagttgtattcattgtgatgaaccaaacttaatcacgtatacatcattagataacatgattcaaataccaacaaagaaaaaagataatctagaaagtttctggatagctgagactttaaaatatctatatttattgtttcaagatgatttcgacctaactaaagttgttttcaatactgaggctcacccattcccggttatcagtgaagaactattaaagaaattaaatttaaccactgggtggaatatttaaataatgtcaatcttcatacagcctcgcccatcttcacatatatatagatccatacagattttacataatgtcaatatttcccccttctattctttacattaacactttatctttacataattgaaatattgaattgacaacatcaccctgattcaactgcagagcattaattgcctcgtcttcagtacatttagtttgttttataatcatatcaatatctttttgatcaatagtcagctcgtccgatctgtcttcaaaagaaggtaacaaagcaggttgtctagcttggtgttgagcaataaccaatttttgtccaaaactatctatcagtggatttccaaagaccatgtatgttccattgcatttatagacctcaggattctcaataatgatcaactgattatccattcttcgtactgttactctgctgataccgggaactctcttataattcggtttaagtaacagactctttgcatgctgcatgttttgtgatgacacatcttcctcttgatccactgccactttcaaaccgttgtcgaaatcattaatcttattattactctgttccatagtgtgtaattgaattgataatattctatgattctgatctagcagatagttaaccagcgtcgaacatacagttgatgccattagagtgtaacccatctacaaatatcatttctctatatatttgcatttacactttgctacttcaagattaaaagattatgaagatttagtttccacccacacatccatctgtaaattctcttcatttgctttttgattctcttcattttgttttgttgattttattaaaaaaaataagaaaaaacataagcaggagagatgatgacttttagtgatcatgtgtgttggatactactttatttatgtaaggaagcataggtgaattagtatattgagatttaatacattccacccttgcttatttatttacttgttcttttcgtttatctctgccatttttttttctttgttatttttgtgtggttcttctttaaataagagtaacatcaaaaatacttcccaggatggataccaatgctttattgcactgctttgctgggactttgaaacatgatccaactatcagacataatgcagaaacacggctaaaagaaattagcaaaacgccaggatttctgggtgcatgtctagatattattgcgtctggtactgaaacttctgagagcattaagttatctgcatccctttatttcaagaataagataaattatggttggaatgcttctggaagctcaacaggtacatcagctttttcttcttcaaataagaatgaattattgagcttcgtagtggataatgacgaaaaaccagtggtcaaagatatgttggttcaaaccatgataagttgttccaaaaattctcctcactgtatccgtattttgaaatctgctttacttacaattgttggcaatgaataccctagacacaattgggatgatcttttacctaaatctttggaattaatatccaatggggatttagatttagcatatattggtttattatgtctatccgagattttccgtacttatagatggaagactaatgattcaagacaagatttagaaatgctgatcattaattacttcccatctcttttacaatacgccaatgattctcttttatcaaatgaatcaaacgtcaatgatgaaagaataggtgagttattaagattgattatcaagatttataaatttgtcacttatcatgacttaccatttgtattacagagagatgaacactttatcccttgggccaacctattcgttaaaattatccaattacctttacccactaattttgtaaataaagttgataaagaatcaagaagccattactcttggattaaatgtaagaaatgggcttatgcaaacctgttcagattattccaaagatatgcttgtaaatctttatccggaagatacgactatgctgattttagggtcatgtttattgaacatttcttaccccattttttacaggtcatgtttcaacaaatcgaactatggggtaacggttctctatggttaagtgatgaatctttatattatattttgaattttattgaaacttgttccacccaaaagaaaacatggccattgatccaaccacattttgaaatcattttaaaatacgttatcttcccattattaacaccaaacgaagacactttagagacttttgaaaatgatccacaagaatacattcatagaaatttagaattatgggataacgattattctccagatttggctgctacatcagtcttaattactgctattggaagacatccatcattaactttaccaccaactatggagtttattgtccaaactttacaaactaacgtgttgaattcaaataccacattagaacaagcagttcatattgaatctgtattaaaaatgttttcaagtatcttggataaattattagaaaaaaaatcaccatatcgtaacgacatagagaatttgttaaacacattgattttccctcttttcaattctagttatgggttcttaaaggctcgtgtctgtgatatttgttctaaaatcggtgatatcgaattcaaagacccaaagcttatcgaaatcatttttcaaggcatcatgacatgtttgaacgattctagtgattcatatttaccaatcaatctttctgcatccctagctttacaaacatttatctctgaaccttactttaaagagactctgtcaggatcagtggttccaatcatgcaaaaattgctatctttatctaatgaatttgaatccgatgcaatatctggtgtcatgcaagaatttgtcgaacagttttctgatcagttacaaccatttggtgtggagttaatgaataatttggttcaacaattcttaaagctggccatagacttaaatgatgcatcaaatattgatcctgctactattatgaattcggatgatatcccagatgaatctgataaacagatggctgcattaggcattttatccaccataatatctattcttttatcgtttgagaactctttagatattgtaaaaaatttggaacaatcattttatcctgctgctgaattcatattaaagaacaatatcgaagatttttatcgcgaattaagtgaatttttcgaaaactcgacatttttgttacgtcaagtgacaccaatcacttggaaagttctggaattaattggcgaagctaatcgtaaggatgatagcatgatttcgtactatttagaagattttatgttaatgctcaataatatcttatcatatgggggtgaagaattaagaaaaaatggattttatttaaatatactttttgagatttacgcagatttcagtattaccgaagatacctcattggatgaattaaatgtacttttcgatctatcacaaaaattgacaattgcattaggcacacagttgcctgatgcagtgagagagaaatttttaaatgactctttacaagctattttaacagaaaaggatatattgaagactaatattgtgtttggcgttacatcattcaatgttattttagctaatatcgtttcagcaccagcattaacgttaaaatacttacaacaatgtaatgcacttgaattattctttgatatatggttgaaccattatctagcacattatacaagaacgtttgatattaaattatccacaatggcattattatacctgttgactcaattaaccgaggttgaattgactaatttttccattgcaagaatattacctaaattaggtgccgatctagttgatctaataaaaagatacccaaaagctgaacgtgaattagcagagaaacgtaaagaatatacatctttcgataataatccagaatctacattacacttcaacgatgatgatgacaacgatggcgcttgggatgcagatggcgatgatgaggtagcagataatgaggacgatttaattgtccaaaaattcttggatgaattgaaaaataaagatgattcaggattccataatactttcagtttcaacgacaacggttcatttgatgacttggaagaagacccattgaccaaatctattcttgatgatatcaatatctactcattagtcaaggcctctctatctcatatgcagcaagctgatgggtcaaagtaccatgcagtatttggtcaattgactacagaccaacaacaatgcctgttgcaagtaataaattcctaactttccgtcatcttacacctacatatatatgtatatttgtgacatacatagatttagttatctgtttgtgacactgtaaaatatattgaaatggataatagcaactactgattgcttgattcagtagcaacagtgttagtaatagtaacaataacagtagcaatagtcaataagtaatttatggactgttgatggtggaagaacctgcttatggaaagaagttttatatagttacatgctgtggggcacggatgttgtgacactactgaaaatttttctatcttttcttgaaccggcagagtgaaaaattttgaaaagagagccaactacatcaattttgatgtctttgttcatctcatctcatctcatctcatctcatcgcaattttttacaacatctctgttagtcaaaccaaatatcaattgagacactcacacgaatacattttatctctggtctcatatcttagcttacaggatttgatcttttagaaaaagtgagaagaaaagattagacaaaataaagatccaaaaaacttcaaatagataggttgaaagataattagccacacaagaatagattggatttaaaaagtcgacatggaaggtgagccaaaacaagatattattgcaagtttttcgcaggatgcgagtaagtttgcatttcaagccaatctctcacaaaaaaatgggattgatgtatatccattagatcctacaactggctataagatcaatagttcttttgttagttgtgtagactatgagagtactgaatttcatgcctctgatttattatttttaaattggtgtaaaagtattgatactccaaatattggtagtagacaatcaaagagaaaactagtagaggataacgctcctgaaagtaaggataatgataaaagagagctcaaaacagaaaatttttttgttaatgcatttcctaagggacaattagtaatctattcttccaatgggaaggatattgtaaacatcattcgtaataaacaggaaattatagggctagatactgtagataacaatatctggattcttgactcaaacaaaatagtcaaaatttttgactataaatcaaataaaccattgaagacctttactttaatcgatgggaaaaatgaagatattactaatttccaagtctttaaaatcaatgaaaatgagattttgatcataatattcactgaaaataatgtttatgtcatcgatccaagtaaaaggaggccatcaacaaaagccaaattcgaaatattcggtggaatctgtggtggtatctcctttgatgggcaatatattgtgattgcaaacattgataatttatatgtttatgatattcaaaatcaggaattgattaaatcatggtctttacaagtagaaaatataaaaatttttaacaataattacatatttgcattaaccacgaagggtcaacttttaaatgtctaccaaattggtcaagatgatgccgtaagctccattaaagttgctaattctgaaatacttgacttcacaagagttagggatgatatgaacaatagtaatattctaatagcatggttaaatgttaatgaaccaaattttgaattgtttaccttagataccattatttcaaataaagaactcataataaacaaagaaagtgttgagttagatactattaataatcatagcaaaataaacgaagaaaggaaaaaggacatggaagattcaaaaagtgaaaaagttgataaatcaaaggaagaagaagaaccaaaagaggatgctaatgtaaatgaaacgaaggataataaaaagaatgaaaacaagcaaaagaagaagattacaaagaaagaacaaaactcagttgtatcccaattaatttctctaatagaatctcgtggatctgaatcagaaattataaataatctaacttcagcaaatacatggaatgatgctagagtttcttggtttattagtaattatatcacttccgaatctatagccacatttctcttcaagtgtattaccaatgcattacaaagaagaatatatgaagagactacacttttaaatacatggttaaaatggttgttaactttagttaatatcccaaacagttttaaacatgataaggtaaacaaaaaaacattaaaacattttaagtcctcattaaagacctccagtgaatctttaccaatattgttgggtattcaggggaaattagaaatgttaatcagacaagctaaattaagagaagaactgtataatttatcactagaagaagcaaatacgaccaatgtcccagataatacagtaattgaagaaggtgaagggcagaataatgatgaaagcgagaatattaattatgtaaatggtgagactgatatttttgttgatgcacaagaataaaagaagactatttaaatataaaacacaacaatctacagtaacaatatttacatacagatagaaatatatatttgtatatggatatttataaatctatagaaatgtagaataataatggttaaaatggatatattaattctaatacatagaatatccaaattgtagcgtattcaacagaaaatgtttctgattgattagccaaagtttagcacgaataatactacaccaaatttttggagcacacatttttaatataccgcaaaatatgaaaaactttaaagtgaacaaaagaaaaaaaattatttcaagaaacaaaccacaaggcaaacaatagagatgagcttattgtggatattctactattgtcagagtagtcaaaaaattaagatatttatactagattaatacagaattataaattcacaatgtctgaaattaaaaaatactatatctcttataataacgttcataaattatgccaaaaggtagctaaagagattttaacgagaaacgaaagaccagatattattattggcatctctggaggtgggttaatcccagctagagttatcagatcctttctaaaacaaaaaggggagaaaaatattccaatccaagctattggattatcattgtatgaaagtatgggaaatatgaatgaaggtatggaaagaattggtaaagaagttgttagaacccaatggctagactttggtgcgcttaaagaacactttgattcattaataggtaagaaagttcttattgttgacgaagtagacgatacaagaacaaccttacattatgctgtcaatgaattacaaaaagaagttgaacaacagcaacaactattgaatagattgaatgaaccaacaacattttctgtctttgttattcataataaggacaaacaaaaaaatgctgagttacctaatgaaatgttggaaagtggacgttactatgcagcagaaacagttccagatgaatggttagtatacccatgggatgctgatgacattgatgaccataccagattagccaagttacaaggccacgactaatcaaagacaataacaagaaaaaaaaactccatcacatgataaagtaaatatttatatttaaatatatatatataaatatatgagtaggaatgcccttttatttagtcatttcttgcatctgtaccatttgttgtacctgctgcttcatcatttccttcaaatcttgtacatcattttctaattcctctgcatattcggttttttctcctaatacttgtaaagctgtctcaagttgattttctaactcagtaactttaactttcaaagaatctctttcttgctggaaagtctttactttttcattctcttcaatcaatttcaacaattcatcattggcactatttttttcatcctttaattgatcatacgctgcttgtaaagaagttaattcaccctccatacgtcgaacctcactaccaagtctactaaccaactgtgcattaatttgattattattactacttattatagtattgtcattaacatagacatctctattattacgattattgttaattatattatcaccattattaatattatctgttgaaggtgaaaaaataccgcttataccagatactgatgggatattagctaacaattgtgatgtacttgctttacgctcataattcaaggttgatatagagcttgcccttttatttaataaaaatgagtctaaattggaagatgcttctggaaaatggtcaaaatttttatcactaacacttctttgattaaatggcatgtttatatcatcaaaaatttcttcagggtgtccatcgacagttagatctctttgaattggtacttcattcacatcgtttacttttggtaagattaatgaccaatcatttccaaattttaacgagatggtgccattactttcagtttcaaaatcactattattttcttcaacggtattgtttttattaagtggggaaactgatctatcctggtcttgaaactttggaagattcgtattactagtaaggttattagccaattgttctttttgaatctcaaattttttttgtaataaagcataatcttcgttagtctcttgtagcgagttcaaaagtttattcttttcggacaataggctactgattttcaaattatcattatctattattttattctttttagttatatcatccttgagtgtttgtataagaatatcattattttcatgtgctaactttaatttattaatctccatattagaggaatcaactttttcttgtagatcagataatttagaatttaaagtaaattcaatactgttccaattggctttactagaattgaattgttcttggagtgtgaaatattgagtctcccatgaagcaaaagtacctttaatagaatttgtattattttgatcattaacagtcgcattattattaccatcatcattactactaccatatttatcagatttttgatcattattgttaaaacctttattagtattactaatggaaaaatttatatctttatttggatgaatgaacttttccaattcgattctcagttgttctaatttactctctaaagtcgtgacctgatctctagtagcctccttaatagaattcttttctcttacataagcttctctttcttttatcaaagtgtcatttaaagtattaacctttagttctgtttcatttaaatgtgattttaaacgttcaatagtatcatttctttcctttaaatcatttttcaactcagacacagtttcattattctccaaaaatttcttgagtttaatgctattctctttcaaatcattctgaagttgttttaatgatagattcttactttttaaattattttgcaaagactgattgttattttgtaaactagtgatcttttgtttattggattccacaattttattgaaatttcgattatctttatctaatcgatcaacatcttccctaaggtcttcaataagttgatccttttcttttactagtttcaataaacttgaatcgttattgtaagtttttttagaatcaatggtattgttattttttttcaacgtttcaatatgaggttttagtattgtaagtacatccatcacattcaaagaagtatagttgtctggcaaccaatctttaaatagtgtgaaatcatcagtttgtactgttttgtttttttcaacttgtgtttctttaaaatcattcgagcccagcaaattatcctcaatagacctgttttttatctccttatcattttcttcattatctttgttgttaatattgtcatcatcattaattgtttcttcatgatctatatcattaagatttgtcttaactttagcagaatccaatctttgccttgcatcctgactagatccactgatatcagcttgttgagtcttgttatcatcgatttctttagttgacccaatagtttgggtctgtaatttgtttatactagcatgtgctgcatttctagaagactttgatttttttttacccttcttggcagctaaagatagtctttcttctaaagaaagtttcttagtagacatttctatctctactgatctctatttttaaaataatttggatacagttggagcgattgttatgaatcgacacgtttactacgatgtccaaaaaaagaataaaaaaagaaaaaaataaaaaaaaatagaaagagttcaatgatcagccaatcccaacatatcagcaactacttctctctatctcttttattttctctccttcttgatttatcaatctttcgattcattcttcatattttgaaacattttcttcattatttttttttctttttcccttccagcagaaattttccatttgacgttttccctttgctgttgggaaagaagagaaatgggatcatctacactgaaatgacacagaagtagaagtagagagggattatacacacacaggaacagaggaacagaagaagaactaaggttattggttggtatagtggtatcgaaaaaattaaatatacactaaaagaactttctgtggctttagttattattgagtgtcattaaatcaataatatagaaaagaaaaaaagagtaatatgggaaaatgcctcaaggtagcgtatactacctgcttaaatatcttcagcaaaatttattagcgttacttcacggtcctcactatatccataatttttggattctgctacattaatcaagtcaccactcaaaagaattctatataattcttttgtatattcgttgacttggaaagaattcactgtcaatggtgtttgatcatttaaatttatcaacctttggaataaagacattactgtatctgtatcttcatctgacagttgtgtttttgaatgaaaaagattcttttgcacaatatgctttaaatcttcccaatatttattgttttgctcttttaatacctcatttgtaattgtttgcggtgatactataaaggcgcttgaaatgtcactgttttctttaaaagcgttaattaatttcaataaattactattgattgctttttgatttgtactggactcttctaatatactcttgtaatcattcaaataatctaaataggattcacttgtctcctttcttgtgagattagaacaattggcaaggcttaacccaatcgggtctgatctctcaggaaatattaacgaccttttcaataaagatttccaaactttatcgttaatgggtttaatctctttaaatctggggtcttttaacttttgatcttttaaaagtttgattgtatctaatgcttgccttaggaaatcctcttttgtcgcaatttgtctttctaaagtttttaaatacgcatctagcaaccaattatttgtttcatcacctgattgaacactattcattattattattattattgtaattattattgtccagatacaatatcctatctcctatatattataatatctctttttctctcagccctagtcgcacatacacacacatacacacacatatatatatataagcacagagacagacttatttactcttctttatctaatactcaccgagttgactacaatatttttttctgaagaagatatcttcccatctgcacatgtctctttacttctgttcctttcttactctccattttttcattctcgatctatattttatgtatatttttcaattagaggatgatgcagagagtttgcaggctatccatttgtggacttccacaaagaaataaaataatttcctcatcatgaaccaaccattaaatacaaataataccacgttctctagcagtcgtgttatatagtaatttgccctagaccaaaaaaaaagaagacgaaagaaaagatacagactaaacaaatataaaacacatacaattgatatttaagaatgtcttctatcgatgctagtgagattgctaaacttgataatgaatccaagaaggaattattaaactttatggaaggggagaattcaaaacaaaagattcaaatgtctgtacataaatttactaaaatttgtttccctaagtgtgtaaccaatgtggaagccatgcagttatcttctgatgaacaagaatgtatggctaattgtgtcaacagattcttggatgccaatattaggattgtcaatggattgcaaaatagtgttagacaatagtttaaaccttcaaacccttagatattcgttttcctctattttctatcgactattatatatgtacttgtattatatatataaaataattttttttgttagcatgtttaatttaaatatccttatatgtaaatagcttaataataatatctttatgatagtcttctttaattaaataatcttttatttgtgaaacattcaccgatttaacctccatttgtcttattaagtcatgtaaacatttcaatctatctttgcctaatttaccttcagtttcacatttgatcgttatcataataataagacccattatatcatatctatgcgcctctatcctttccttaggtattaattccactatcaaaattttaataaattctattattttatctacaatagaatcaaacaatgtaaagaaaggatctttaaccatagtttcaccaattacatatattatcctctgaaatataatcaaacttgctgcgtctagtaatcttaatatagtgattaattgatttatagcaaacaataataatttttcatacttaaaaccttcacatcttggtatactatgttgcaaaataacttcattagctaattgtactaacatactattatattgatatttgtcaaacttagtaggtgaataagaattggtctgtaattggtacaatttaattaatgttgggaaaactgttgaccaaatccttaaggtatcctcaggtttaaagctaggtggtgtgaaaaataacatattttttaagattggttcaaataaagggaatataccagtatcttgcacctgtatccatctacccaaccctttattattactattattacaagtactactactactactaccactactagtattattattcttattaaaacatattaacaattggtaaaataactgtatagatggtagtttaatttcttctaaatgatctgtatcatccataaaattcaatattccaggtattatccaagaaagattcccagatatatccttatgttgtagtttcgataatataaaataaaataatccaatataccttgtttcgttgttttgataccattcatttctcaaattatcttcttccataaataaacccaattttggatttaaccctacatttctattaccctgttttatagttttatcattcttgattcgaagcaagtgtggttttaaatgaagtatcattgtattaataataatgtccgtctcttccacttcttttgtgtccaaatacgtccagattttgtttaaattcaactctagtctccttttctgttcatctagtattgtagtatcacacagaaaaaagttaaacattctaacaattgaattaacaatctagtgccatctacgggctcattttcttctctctctgatccatcttttattaatctatctaaattttcaactgcttcaaccttgtccagtatagtatccagttgttttcgacagatctcatactctgtccttatattattattacatttaaccatccatttctcaatgtaatttaatgatgccattgcactattatcaaatgtccaaccacattacttctgataaaaaaagtaattgtaaagaagtgaaaacactctaaagtcactatttctttttaagttattatctttagcgacctgttctttctattctgtttttaatgaaatacaatttattagagtcagtttgaaaacccatacatctctaaagtggttcaaggttctacacataatacacatatcattattacagttatagacatatgtgttctttttacatgacactatcgatcccagtcagtatactaattggttatagttgcgatattaataataaaagtaataagctgcttttttataaatacataattgggtatagacggtagacaaataaataggatttaataaatacatacatacatacataaataaataaggctataaaaaattgaatgacattaaattagttaaacactctgttcttaataggcttcttcggaaatatcatcatggaaatatttaccttctaaagttggtttgataatacctgctctaatacagaaatcaccaaaatgttcaccttcattcctttcaagagcccatctcttaaataatggtctcacaatatcaacaatatcctcatccttaacagaagccctgtatagtttatttaatctttcaccgtagtaaccgccgccaagcatgatattgtatgtgtttggtgctttaccaataaaagccaattctgctaaccatggtctagaacaaccatttggacaaccagtcattcttgtaacaatagagtcatgacgtaacccatattcttctaagatatcttctaattgagtgattaatactggtaaataacgttctgattccgtcatagctaaaccacaagttggtaaaccaacacaagatgtagatgtttgtctaataccagataggtcagtattatcaataccatacttatgcataattttcttaactttatctaaatgttcatcagttatgttacatatcaaaatgtgttggttaccagtcagtctaaagtcaccagaacctgtcttcttcaaatattcagcaactgttctaaaaccagtcttttgtggtttatctggtgtatccacaatcctaccattttcaacaaaggcagtgaaatggttcataccagtctcatcctttacccaaccaaaataatcacaattagatttgatttcgaatggtttctctggaccaaacttcttaccaaagatttcttccaccttttctttaaatacttcaacacccatatcatcaatagtgtacttcaaacgggcatgtttacgatcagtacgggaaccgttatctctttgaacaataaatacacttctaatagctgaaataacatcttctgatttaacaaaacctaataaagaaccacgtcttgggtaagtctttttattgttgtgagttgtacccataccaccaccagcatacatgttataaccaacaacatcatcagtctttggatcaacaatagcaatcaaaccgacatcagaagaccaaacatcaacatcattatagggaggaactgtaatattgaccttaaactttcttggaagataaactgggctgtacaacggttcaatgtcaactaatgaattgtcagataatttagtcttcttacgatttggaccagattttctgctttggaacaaagtttcccaatttggatcttcatctctttcatctggaccatgcaaccataaatcatagtaggctgtagtatttggtaagaaatattctgaaatgtcataacccatcttagaaacttgcttatgaaccttggcattagcaggaagagcagtgaccataacatttctgttcacatcaccacaagcagctaaagtatctagtaacctagaattcatggctctgatagcatgcttgatattcttctttaaaataccatgcaattgcagagtagctctagtagtaattttcatagtgccattacctgtttcatcagataattgatccataatcaaccattgatcaggagacgcaacgccacctggcaatctgattctacacataaaagcgtataaaggctcaataccttgtagtttacgaatttctctaagatcacgatcatcttgaatgtaacaaccatgaaatttagtcagttgagaatcatatggatggatattcaaggtactttcatcagcaagactctctgcaatagtacctcttaaaaagttggagttgctcttaatatcttcgttagtccatggtttttcttcttcaatactttcagcagagacacccaaagcctcccataatttaggctcccattcattataaccggtttggaaaccatcagcatcttgatcatcacctaaacccaatggagtcaaggcattggcagctagtaattccaagcgggtaaaaagatccttagccggtttgttatagtaacgtgcatcttcctttcttggccaatattgagaatcacccaacccgaagacagcaaagtttagtgtggataaatctaaatcagtagctgcctttaattcttcccaaaaagtcttaccatcttggggaaattcaccttggccagcagtagatgtaacaagtacaacattttcttcaccagctaaatcttctaagatgatgttatccatagataatacagtagccttcagacctactgagattgcacgtttagataacctagtagcaatggttgcagcattaccaccatcagaagcataatatatatgtaatggtgggccagataaaccttcaagcaattcatcgtaagcagctttggctctattttcttgtttccttgtaatggaatcggtggcagataattgcaggtttctagccaattctggacaatttctcgtcaatagagtcaatttattttcacgatccaagaaatcttctaattcttttctaatgatcgaggaatctaatgtaaatgccaactgaccagtggaatcgtcttcctttcttggatcgtatctatataatggccaatacccagactcaacagcatttttagtctcctttaatacttctaatggtgtatctctttcagagttatatggtaaataagctaagacgatagatggaccatggaaactagatgcctcgataaaagcagttaataattgagtgtatgatgaataagcagcgacagaggcaacataaacgtcatggaaattcatagcatataacccaacattcttcttgtgattgtttgttgagcgattttttatttcactgtagggttctgaatcgataattaacatatttatgtttttctttgaggcaaggacatgatgaacaccagagtaacctaaatcgtaggaccaagcatcagacccaactaaccagtttgatttgaattggaaatgttccaaagttggagccaactccaggatctgcaacacagcgttacaatcttgattatcttgtaaaatggtgaatacttgattagctaaatcatttgcttcattgagttgggattcatttaaacctaattcattaaaggaaacccatttagatagaagcttaacaaactcattagggtctgggatagtggagaacaaggttggatctagtgattgcttaactttagaaagtaaaatgtcacgatcatgatcgtttttcaaaaatccaccgaacccgtattctggagtcttaatattgattgtgtcgttaccgtattcattgatgatatttaggttgttgtcgaacaattgttttaagactttagtgtaggctgtctccaaattaacgacgtttctgatggcttgggtgtattcattaatatcttgatttgtagataaatcctcaccaagatacaaggagtggtttggagccgaagattgaacgttattgacgatagttgttaaagcggactcaatatcagtcaatgtgcctacattagatagtacaatttggtcaatttttctttctgccaaaaaagtaaaattatcaaagaagtccaataaaagtgaattaaacccagtaccttgagttgggtgattcttggaagagccttcaacaatagcgatcttggtgatggaagaaggcaaactagaaagtagctgaggcaaggtccatggtctgtagattaggacatctactaattgaacattcaatttgttggtaaaggcagcgaatttggagccataggatgaaagattaattaaaagagtggtggtagaagaagaggaagaagagaagaagaggaagaagaaatttggtcattggttggatatattttgaaatattcaacagtatcatctaattggtaatttggaataggttgatcattctgaagatcgaattttggtaaagccaattctttgttgtaaattgtattttctcctatagaatcgaaattaatgaaatggaagacgggctggttattagagagagccagagtatagaccagttttccattagtacatagtgattccaaatcgtttgatataaaagttgggaagtcaagatcctttaaagccgggatgattgaataatcgttcagatccaaatcgatattgatcacggtggaggagtctcttaagttgtataggtggggtaaacttttcaatatggtcaattggtcagtagtgatggtggtgagttcatggttagtgtgagaggcttgtatttctgagactatgtgatcgaaggggtcctgagaggtgaataatggtatgctattctctgtgaagttatatttagattttaaggaagcttcctttgtgcgagccgtgtagtaaactttattccttggatataatttagagagttcagctaagacatgatataatgtcactgctgaagccaaagtcatgtttttatttttttatttttttttatttttttgttatttttatctttgatctattaaaatattgtggagttaatgaatgaatgaataaatgaatgattaaataaataaataaataaattaataaattaataaataaataaacaaacaaacagatacatgaaaaaaataaaacaaaaaaacaacaacaacaaaaggttaaatagctatatagaagagagattcaacaagctcattggagaagactaatgttcaagtatatatatatatatatatatatattggataatactgctggataacacagtaatgtgccagaggtataagttaagactaccacattatttattggagatacatatatacaagagatcgagagtatagagataaataactaaagctaaaaaaaacaacaaaaaaacaacaaaaataaaagtgaaaaaagagagagagagagggagagaagacaatgattgttgtgtcaaatagtgtttctttttgatgtctccaccaccaccaccacctttctagagttgagaaagaccggataagaaaccaagggaatgaagcaatagaacaaacaaacaaactatagacagcatacaaggcatacgagacttcttacagcaagagacagagtcatcttgtacgccatgagttggtttgaatcatattatctctccgggaagtattcatgcatcttctcttctaggaagactcgatcaatcttaacttggttggggaatgtgtgatgacagtatggttcccacaataaatgatgatgatacacaaatacaaatacaaatacatatacaaatatacaaatatacagagacacacacacacacacacagtttcctccgctctgcaaacaaactgatttttctctttgatgtgccgcgaaatcgaagtccaccaccaaaggaaaaaaaatataaaaaagtccattgaagaaaaactgtggagctcttccctttgttcagaacaaagggaaaaaaaaaaagagaaaaactgtggggttctggaacctccccttttttttttgctttttttttcttgtgacgaaccgaaatgtgtaggtgcttatgactaatacttctgtgagatgtttacgtcatcagtgctacaacatcacgtgacaggctactatttttcttcttttttgtttagaagattaatatataatcatattaatacatagtatagtacaatataatatagtatacagtcgttatccacaagattggctaagaagaaaaaaaaaaaaaggaaaaaaagaaagaatgttagccaacgttgatcaatcaatcgttcgttcgaatacatatacagtctgaacgctgagtttcaactcttctaagctcataccatcatcattatcactatcattatcgttacccctctagtactaataaccatattcatttcaatcttgacactatatactttatattcgcaacaatgtctttatcattaacttcattaaaaatattcacttcttggaatggtatttcgatatctaataaaacagaagtatcattcttaaaaaaaaaaccttgtatctatctatctatctatctatctatctatatatacgtgagtgtgagtgtgaatgtgatttagtgtttacgtttgtgtttgtgtttgttgtttttttaacattgcaacaaattttaaaggttacctccgttgtgaaaggctatttttattttttattttttattttttatttttccttttttctttttctttttctttttcattttccattttattttccattttattttcacatagttattatcattggcatttccctctagtattgacttaaccagcaacagacaattctatcatacttcacttacagtttcttattcccttccctgtaataaaacctcactatcctatttttaaataaaagctcttctttttttttttctttttttcctttttcttttttctttttttcttcctaaaagaatgagaagatatgacttcaacaaccactatttttactagtttgaataataggcaaaagagatctaaaaagaataaatcaaaccgtaaaactaataaaaacaaaaatatcctctcaaacactaataatgctcaattatctaatttcaaaagaccaaatagtccccatattataaattccgctacaaatgctaatgtgatcactttaaattcaggtagtttggttgttggctctctgaataatttgaatacaaaaaacgaaacaaatattcatgctaatagtcagaacctattaaaagatgataaaagaaataaattccaaaaattattatccataaatgccagtaccactgctacttccaataataacaataataatagtaataatggtaacagaacctccctcaaaggaattgattcagacattcatgacaacataatagatgatgataccgttgcaaacccaaaaaaacataaaccaaagacatatcaattggaaataatgtatcatgaagcaagattttgtaatgacctcatacttttaaatttagaaaaaattaagggaatcaaagaaggtgatttatgtgaattaaaaacttataaccacaactataagaataaaaatgaaaattcttcaaataaaaaaaaaatttatttcatcgctaaagattttagtgaagaattaagacaaaaatttaaaaattccaaaatctctatcatgttaggtcaattgcaaacattattagacattccatcaaaaaccaaagtatgggtcaaagttaaggacaaaaacttatacgaagttgatactatagaaattaacattaaggattgctcactgaatagaggtgatatgtgggttttatcatcaaccttggttaacacttgtgtgttcaataatcagaaactattattcttaaattcaataagaggcacagtcaaaggtatctacagggatggtacaaagttgggttcaggttacattggtgaaaggaccagaattgtatttaggtctgaatcagctagattaatattcttaattcaaataactgaagaaatgtggcattttgatgaaactggtgaacagttatttcaaaaaatgataaattctttttccctaagatatttaagaaatggaaagaaatagatacacaccatttaattacaatagctttttcaatttcaatggatttatcaactagttcttataagacactgaaaccaggtgaaaaattgaaaaacgcaactgataattatcgtatagtagttgatcaagttagtattgttcattgggtgcaaattatggaaatattatgtaaagaatttgcaaatttaagagaagatttattaaatattaaaactgacaaagggtatactttaataaaaggtaggtttgccccaataatcaaatcaaattttttagaaatgatcaattttgctaccacagtcttgattgatccctttaaacaagtagatctcagacatacaaccactcatgtaatgatcatatctcccggatcaggcttatatgatgttgattatgacttactaaatttaacaggcaggaaactactgtccttggaaatgacaatggacttgatatgtttatcaagagctccattgcatgttgtaccattattcagatatttagattatgaaaaacaattacactattgtataccgcaatggctcagcatttttttttggaatgactccacaaagaataaacacgaatggcatccccgttgtcaaatctatgatctgcagatgatggggttaactgacaatgaacttgttaaacgacctgaggttccatgccttcattgtgacaaacacacaaaatctatagcagatctaatatatacaattgatgaaacagtttttagtcctgtcgatgaaaataacgaacccatgaacaaaaaattacataatactttctcctgcgaacttgatgccatacatgaaaatgaaaacaatactaatgttattggattaaaaaatacccccagacttgtctggagtgcacctatatactcaaaacctgttatacaagaaacgcaacagtttaatgtaactggtgatttatctcttactggttcccctagcaactctaataacactaattacaatcatgcaactaataacaagcatgagaataacattttaatttacaactgccaggatagatcaactgtgatatcttccaaaaatcaagatgcaaaagatttaaacactgattatcatccaacgatacccaacagaacatgtaatatctctggtaattctgcagcattgaattcacttaaaagtttaacgaaaaaggaatcaattagggacataacaaaaaagctttttacaaaatttactggactatcaaaggagacaagtatatctaatatttctgattcagtcaaccctcaagacaatagcaaaaaagatatgggtaatgaactatctatgaaaggaaaacgtttccgtagtgaaatcaattatcccaaatcagaagaccagaaccgtaaagctttaataataaaaaaaaatcttgatatatttcgctctcatgaagacaatgatgattcttcacaacttcacaatgatattagatctcatagggagtcgatggttactaatcaatcctcaaaattttcttatattcagaaacaaaaccacttacttctttcgtctaatagccaactttactcagaatcctttgaatatcaattcactcatacatgtttaaatatatccaatccctcaatgcctgttaccgtagatatggctgctaaattactcccattaagatggaaagatgtttggcctaaatatattgctaagagatatagtaaatggcgttctttcactacaccagcagaattacctataaccatatctgattttccaaccccaaaagattttgaagacaacttcttctttagaaatcattctgtcaccttgaatattgaacaagaacaatataataaaactgttctggatctactcaaagatatgatttatgtaaggctagttgcaggttttcaattatgtgtaggcctccctgtagagcaagtagaaaaattaaaggataaggatgcctttgtggttgaaaagtatattgacacaaaaaagtggaatattatcaaaatttacatgatgatcgattcagaaattcataggatatgttgcaatcaatcgggtgtaattgatgttcaaaggtatcttaggaaaaatgacattgattggtttgagcaggtgcctagttatcttccaatggtaagaactagatacgaagatcattataggaaagctggcatggacccaatacatgcaggtcgttcatccttaaattggaatcagatagatcaagttttagctggatatggtgattatatagttgataaaacttggcatggattcagagccaaatttgttcttttgccagcagaagtaccacctaatacattttctttagtcattaatggcaaaagtgaaacattaacacctgaagaattaagattggaaggcttacgtagagtaatttcttctatcacaagagcaagaattaaaacagaacaagaaaagagaactaaagcagaagaaatacaatcagaggtaacattttacactggatcattatttgattttataaaagaacaacataatgcattagaaagaacagaaagtctgtttatcaaggggagtagattattgaataaagacattgaaataccaaaattaattcaggaattacaatatggtccaaataaaatcagacttacaactagaaaatggcattggaaaaagcacaggaatagctttcttggatcagaaatggtgaattggttgatacagaacttttcagatattcatacaagagaagaagcaatcgaatatgggcaaagcttgatggctaagaaaatatttgtgcatgttctaaataaacatagttttctagatggtcattatttctatcgatttactcccgaatatgaagtggatgaaaatcgtattgaaaaaacaaactcttcaaacaattcattattggattccacccaagctttaaaaaaaatgccgacaaatggaacacaagataccaccgcaaagacttctttaacgttatcacgttctacatctttaacgtctaaggacgatcaaactgatgttaaatcgtcaaaaccagttgtcatgttaagtaattccatcactattgatgtggatccattaaaaaagtctaccaaacatgaaacttgcactgtgcattatgattgtgtgcataaccctgatcattgctttcacattagacttgaatggttagcaactactccaaaactgctagatgatctaattggaaattggtctagagtatgcgaaagatttggtcttagattaatcgaacttccatggcaggaactttgcacaattccatcaactaatcccttccactcttttgttgagataacattatctatcaatccatgggaagatcctgaatttcatgacacgcagcttttgagccaaagtaaattttactatcatatcaatttactaacaaaaagtggattcatgttagataatagagcatcttcattgttagaaaaagatgacatctattttgatgtacagtattcctggggtaagcctgaatttaaatatgctcaatatatccattacacaggtacttatattgctgagataagagagaatggcgatttatttttggctccaaataatatatatattactcgaatgtctctagggaataaaaatgggaaactccgtaataaacaaaagcttacactcacacctcaacaaattatggaggatttcagatcactttgtacaaactatgaaagtctaagaattatatttctggaaatcaaggaagaatggcttcttcataaaaatgataacgactaaggcatttattttttataatatgtactatataaatgtacatacacacagatatatatactaatacgacataatgcattttagatttaactatgaatgtgaacaatgattcactaacaaagtgatttgataattacttcacttgatgttaaacatttgggattttctctattagatccttaattctatcaaacgcctcctttttactcacacgctttttactagatgaatttttaatggtgtctgatgttggcaacttttctgctactattatgtttttcatattatttgaaactatattatcttcatttgattctgattgagatactatatttttattctcaacatctaatttagcgtttatcccaggaataaagaaaatcttaaaatatattgcaagacaaggcccatcaaatgtgattccattgctacttctttttaattgatacgctaactttaatccttcagtgtatttattagaatattttgatgagtcaaatgtctttcctaactcttcactggcagacaaaaactcattataatttaaatttggtaataatgtttcaatatatttatcattaacatttaatttttgataaacacagtcaatatagcgcttaatagaataatcaattgcattattcacatatgccatggctgatccaaatctcctaatttttctaataatgataccaattgaattgaaatccccttttttaaccaacagatccacatagaaaataacatattgatatgtataaacaaaatgcttacctggcctttccaaatcaggcttccatatatttattaaacttttattactacgaattgatataaatttatccatcaattctaaagctttttgataatccttgaattgttcgaagtaaatgcgtgccattcggtattgaagtctatgatgccaattttttttatctaacgatattaagtgctctaaaaatgtacaaatttgttgataaaataattcatctgagtcctccctatcctttaagaatattttatcattctctaggcaatccttaaatattacatctttccttaaaatatcccttgcagcgtttctagttaaagtcttggctaacacatatttataacacattactacaagtgcataatgaggctcaataatagcatctttttgttcggatgacaacattgcatacgtacatgcctttccaaccttttcaaatatggtgtcaatagaatcttctctattgaatttaaaaagaagtttagcaataaaataataattcatccaattttttatagtagcattatctaaaatgttgttttctaactcaatagcctttgaaaagcaaagtaatattaattgttgaatgttgaaatctgacatagttaatgtagacgatatatgcattttctctacgtgaatatcatcagaaagtttcagtattggaccatcataattccattcaaaacatgtcttttccattggcttgtaataagatatcgtaagttctttccctagtgactccaaaaccattttcaatatcgtattgtcatctttatcacgattttcctttgagtataataaagacaaagacattaacagacacaaaattactttcctttgagcaacagctatagtgtttttcttttccttagagactattttatctgcagtccagattaaatcatcttcaacaagaaaagaataacactgacccaaaatataccaactctcatacctttgcgtattatacaaaatatccgttgtaatattcttgattatataatctaactctgatggccttgcttgcatcattttttttctttgaacatactggcctagtgcttgtacagaagatacgtaaaaaattcctgcatcaattgcctcttgcaattcatcattaggtgatgataatataacttttagctttccagctaaacatttcttgacagtagaaattgtaatcggttgatttaaataatcttttaatctttgatgatttcttataataatatatttttcagaagtaatcacatcacctatagtctcaattattttatcaaatatttgcttgggaatatttttattaccaccgtaaagaataggatgagtatgttgatattgtaattttaacaaatatattcctaatatcaaggatgctgatttagtcataggtctttcaattgtagaatgtggcttatctagaaaactatctgaagcagtagaaaaatgatatttacaccataaaacaggttttaattcactgtaagattcataattcacatatttgcatagaattttttctatcaatcccaaaaacaactggttcaaggaatcacaaaaagctaattctcccagtaaagtatgaaaattagaaattattttgattgaagaagaaccatctatctgttttttttctaactcaagataattgtttgtaaaatatatgagaagtgaaataattgcagtaatatactctttaagtctagctgatgatttggtaaccctactgaaaaaagatgtacagccaatactctcacaattgctttcaaagtataatatagggtaataaaaataaaaaagttttaataaatgatccacctcaacagaggtggtaaaaagattattaaacttccaatgacttagatccataaattctgcaatcctttcagaaaaactacctaatatagaaaatatggacaacagtgttgccattctatcctctttatcacttccctgatactctccagacgacaaatatcccaataaaaacatactcagatttatgtataccctttttaaagatacaatatcatttgcttttaaataataactgaaaataaaatcccataattttattttcaaagtgagaggtgcattctggatgaaattaatcatatcatcatctaacttaatagattttattgtcgagttcgaattatgtaacaatattttttctaggttattgatattttcaatttcttgatcaatgtcttccaaattaattaccataaaacgttttactgcattgattctcttaagataaatttctatcctctttgtatctaatgtttgtatacaagcataatttggatattctatcacaatgtcagcaggaagttgggagctaagctcaataatatttgtcaagacacttactgttacgtcaccagtaacatcattcatatattgtaaataagtgtaataaatccattttaataaaatttgttgctctaaagcacaatcataagagatcaacaatgaatgtaaacgattgatttttttttccaatttatttctctgtgtctttaaatcagaaactttattcttatttgaatttttagacacaatttcttcagtaaattgtccaagcatattaacaaggatctcatagatcgataaccctagataccatttttttgatagattttgtgccacatattcataaagattagattcaatggataaaaccattccttgaataattttatacaaatcctcggaccataaataagcagtaatatatctagtaatattgtctgaattcaaaagatattctattaacataaatctgatttcatgaaaatgaggagatttcttattaatcttagttataaagtcaaatagtttattgtctgggattggttcaaactcagaagaactttttctggtatcctcggacaattcatttcttaataaagaattcaatttaaataaatcgaaattagccttctctgtagatgagatagtatttttatcgtttttcttgaatatttcagtgtgccagctgttccatgattttaaacattggtataaatcatcataaaatataagtgatacattctccctatttttctttaaactcagatcggtatatttaataggaatatgacaacctatgtttgtatattcactctctaattgagtattaaacgttttatgaagtgtattcgaaatagaagacacagtctgggattcttgcatttcttttgttttaactcttttactacttctttgtttaggtattgcatctagtaattctattcgtctcttgtttatgctgctatctccagtagtattatttttattatcaacgctattatcagaactattactaacctgtgtgagcttattttttgtctctgtatcttcaatctccctcacatcactgtcaacagtcaatgtattctcaattttaatgggctctttaattgtaaaagtcatgccttctataggatattcaatttcattatatggatcagaatttttccccaaaagtgttgacattttaacataaggtaattgattttttaaagttttggcaaaacattcccatgttgtttcgcttatctctaaatttgttaaagccaaagttttcattacattctcatcttcagtttttaatttaaaaattcgacctaaagtttctttaaatttatagtttattatttgatgattctctttaatcgacaaatctgattttatgttaagtatattagaattatttgcttgactctgtatatcttgaatatcattcaataaaccatggtattctaagatcatgttggataaacaaggtaacagactacttgtgtatgaacgacgatggcgtccaagtaacagcaattgattttcatgtttattcaattcatattctaatgtcaatctttctaattttgtggatttaaaacttgaaaagacttccattaaaatagctatgacagtactgtctgcctctgaatgctgtaaagattcaactaaatactccataacttttaatgtgtaattaactaattctgatgatggcatagaatcttgataattctcggataaatagaagtaataatacattgctctatttcgataggaaaggtacctcagtctatcaagacttggagattggtgtttatatttgccccacttatctggaactaagatatccaaaccaaacaactgtttaaatttttcatcagcctcatcgaatttactctgattcattagttttaatgcttcctcatacaatttgaatcctgtctctacttgtaattctatagtgtgttcctcctcctcaacttcttcatctctgggaagtaaattaatggcattaaacatggacatttatatctctatctatgtgtgtacccgttacttctttactatctcgtatatctttgaaaacacaattatcttgcttatttctcacctacacaattttaataactaggtaccaactggttttattaggaactgagataaccatatataaagggatgcgacctcactgttgtttcacgatcaaatatcgtatatttatagaaagttatttattactattcttttatctttttttagtttaaaagatctttaaaaaaagagatgaggaaagaagatcagttaataattagaaatataagcatatatttatctgatataaaaatagatacctgtggaaacagcagactggggattaacaaagaatgaagtatttgatagaatacttacctagaattgattgtattcaggttcaaattgaggatgatgtagatagtgttatattgaagggattaacaccacaagaaatggttattgaatgtatgagaaataataacaccactcataagctacaacaattaaatatagaattacctcaagttgttctagctgttgtagaaaaaaatttaaaatttattagacatagtaaatatatgtggtccttaagattaaagttatatccgaaaaagaatttatcacacaagatttcgactctctgggggtcgtacgacatattactagattcaaaattgaataaatggaacaagaaacatttgaaaagtttaaaagattttcaatttatatgcgattgttgtaaatttattattttagatagtgacactaattgtcaaagattgaatgagatgccttctgacaattgggtggaattgatggactattggcattgccataaacctgatactccaatagaatacattgattcctcaaagcaagatttaccagcattttcatcgtctagatattccactctaaaaccatatactaatgaagttttgataagtggatcaacttttcatacacttttaggcacaataaaagataaaattgaggctattcgacaagaaggaaagacgatattgagatgtattaaatgttcaaatgtcttaggtgaaaggacagcctctaataacatatgtaaattgtacaaatggaaattgaacttacaatgtaagcaatcaaatgaattagattgctatccgccgcaaaatgatgtaatattgaagatttggaattacgttacaaattattcaagaagatacattttattaaaatgtaaggatcgtaaggaccttttgatttggatctttgctttagatattggtgtaactttaactgataacgttgtgtatccaaactcggtaaaaatattatacgtaaatggagataataatgaagattataatactactaaacaagggaagcgtcctaaagattgtaataataaaaataagactatgaatgtggaagaaattgacgttagtgaattaccgtatgaaaaatttttagcacaactgaataacaataatcaacttttacctaatgcagcccaggtgtttaataaatggagaataagttatcttccattgacttaagatgattagtttaattccaatgctagttggtttgattttcattgattgttaccattaggccatctagatcctcaatggaccttgcaaaaaataggacgaatatgtccgttatagaaatgagataaatctgaactctaagacatctaattgatcaatcgatatattactcaacaaaagtcaagaaaaatattatatctttacataccacgtcatcactattacaccataaagatagattagtattactaagaggaaaaagaaaaagaaaaagaaaaatggaaaaaagaaaatagtttataaagagattaagataaaaaaagagagagattttttgttcaagaagtggagtgatagattaactgttacgcatagacaataacatggaactgcataccttttttaatgagtgaccttcttaagatttcgaccttagatgtctagtgaataattgaactgttttctcggacaaatagcagactaaaaatacatttacatatacgtacacccataaaaataggaaaagttaataaggcacaatggttaaagttggtgttcgtcctaatggtaaacaagttctaattagaacggcagaagatgacgagaagaatttttctttccttgatattgtcaatagagtggatttgtttcctttacattttgaaaaccttgaagctttccaaaaaaacgtatattatttaaccacacaccatggaattaaagtcggatttgtttgcaaatttattgttacagaattgagatcattgattccatcagttttactcaatgaaacatttttcatcgatgacgcaacgcatagattaatatttaagtcaacagatttcgaaacaagaaatagccaacttgaagaaattggacaaattttatatagatcccccaattgtaaattgaaggctttaaaagcgtggagaaatgaaaagtatgctatatggattggaggggaaccttatgttttattggaacgtgctctatccggtccttttggtattataacccatggttctcatatcaatggctacgtgaccgatcctgacactaaagaaatcaaattttggattccaagaaggtctgctactaaacctacctggccacttatgttagataatattgtcgcaggtggactaggttatccatatggaccatatgaaacagtgattaaggaaagtttagaagaagcaaatttggagaaacccatagtggaaaaatatattgaagctgcaggcgttgtcacttattttcactatgaaggtgatgcagataaagataatttcagttcagaaagatcatatattgttggtgagacagaatttatttatgatttacatttgccacatgatgttattcctaagcctaatgatggagaagtggattcttttaacttaatgacattagaagaagttgttcaagctttgataaataaagagtttaaaccaaactgtggtcttataatggtggatttcttaattagacatggatacataaatgtggaaaatgaacctaattacattgaaattgttaacaaggtacataggcattttccgtttccaacaatttcatctaattgaaaaagaattaaagaaaaaaaagctatattacctcttataataacttaaagatagtcaattagacgtacataaataaggagacatatatattaatgtatattttattcttgttaagaaacaagaaaataaactgttgatcatttgatctattttgttataatgtcttatttagagaaacttaaaacaatgttaaaccattgtcttagaacaatttcctttggagtcaaagcaacatcaccgtatgttaatggagcaaagaaaatgaagaaagagatgacacctatagttactagaataaagaagaaatttaagaagaatgtatacactgttggggtcatttcaaatggtgctcctggaatttcttcatctttttccacattaatagatttacaatcactgaaaattacttcccaaagaccagcagtaaacaaagctgcaatcaaatgagctggcaagtagtggtgtaagaatttttgacgccccattaagaagaatgggaaatagtgacatgcccaaccacaaagtaggaaggctaatggacaataaagtttttctctagtgattttatttaatgcaaaataatcacgctttctggtaagtagatcagcagcaacaatacctagataaagacagatagaaatgacttcgaaccaaaacccgataatgttaccaatgaaataaatttgttttctctctgcttctttagtccagaaagatacacccctcaaactgcctggccatgactgtggttgagatgcagctggatgctctgaggttaacttattgttatgctcaaacatcaagttttgtaattcgtaccatttagtgaaaaatggtagtttcttcactttctttggtacataaacatttcttgactcgtctagattgacgatagtatcgacagtccagacgttaccgtcatctttaatcttcttattaccattaacttcttgttggttaaacccccattcaggtaagagttcatcgttatgagaccaaagtgctactgcagtgtcaatgtggaagatacggaatgatgtcagttgtgtcttcacagtgtaacctacatcattcttagagattggttgaaattcgaaaattgtttgtttatatttttcaccgttagctaattcttcattaacagtagtaacttcttcattggttggatataagggagatgcaacatcatgggttaataagaaggtatctgtaacgacatgtttcaatctgaagtgatcacctaataataatggatcagaagatgattttggtgaatctagtaaaggtataatttgccagtgattgttgacatcagctgcgtggtaaccagtgacctgttgaccttcagtagagatacgaccatcttcataacgtaatggataataagccaagtgagaatgtaagaaagcattagtatccttgtgtttaatggtaatgatatcgtaatagttgaccggtttggaatttatagtagcttcagaatccttcaaagtttcttgaaattccgcagacatgaatgcatcaccttgaccagaagtgtttaagattgtgaaatgaacccagaaccaaaacaagtaaagtgcaaatggaataataaccaaagcgactaatctagtcacaaaatgtttataaaatttcttcaaagataaaccggaacgaatatccaataactgccataaattaatggcaacagcaatactaatagcagcataagtcattacaccaacgtatttggtggagatgacaagggataatgataccccggttagatgcaaccaaatgaaccattgctttgtgaaaggttgttttaattgttccttgtagaacctagtataacaatagaaggtagaggcaatagtgacaagtaacattgcatctaataagattaatctagaatcgataacatgggcattgtcaatagcaaccaataaggcacccaaagcacaggtagtagctctgaaattcaattccttcaaagtgttaaataataaaggaatagttaaagtccctaaaatagcattgtaagcacgataagccaagtatggtgcagggtgtgtttcataagagtcaccaatttcattgaatttaaaggaaccatcataaccacataaccaaccaataaaagcaattgccatcttagcaaatggaggatgaacatcgaagaaataagatctttctaaatagtaggatgcaaatttaccaaaatggacttcatcgaacacaacctcttttggataccataatttgtagaatctgacaaaggcagcaagtaaagtcacaataattaaccaagtcctatactgtccttcagaggatggagccttttgaagtagccatttagcaccaagttggtcataatttaaagctttcttggtatacttaaatttcatatcatcaacatcaacggaagactccctgcttgacttatattgtttcccggccatgttaacttatttaagttttgctgggctgtgctgtattttgttgcaatagctatttctatgtctatttagttaaactttatttttttgtaattattcacaacacaaggtctcttctaattaatctctgtttaatctcaatcaaagttagataataatgttaaaatctcactgaaaccttaatatagcattaaaccggttggtaagacaagttgaagcaacacgatctttgtcacgacagctgttggttttgcacttgatatctttatattctcacttgtgctacttcaatcaatctttttttttgtacgaacacgtaatcaatatatactgaaaaactttctcgaagaaaaaaaaacaaaaaaaaaagaaattaaaactgaaaaattccactaaatcctttagttttttttttcacttttttatgacaaattttgaaggaacggagaaagttagaaatcctcgagctcaacacacataatgatttgtcgctatcaagttgcaattccagtgtctgactcggctgtctatccggtccagtgaagatgacactagaatagaatctattttattctgtgcaacaaaaaccgaacagaattatgtcactaatggattatggtatttcaaaagaggagtagtaatctatttgtgtaatcttttatatagttgaagatttaggtgctacgacactaacctcaacctctcttttttattttttttttttttttgataaatatgtaaattaactaaaataaaatacagaaatcctaagactacgtaataacaatttattaaagaaaaaaatgactataaaattatatttttatgtactgattgactatttatgaatatacatttaaataaatggaaaaataaagagagactaaaaaaaagaagaagaagaatggagaaattattctttttcttttttttctttcttatttttagatttatctcactttagtcttttatttcgcaacagttaaaataattcataaaccttgttgagctcttcttctgtcacgttcttcagcaatagttaatttaatacccttaccctttggtaaagaaatgtatggcttaccttgttcaccaatgatgaagacattgttcaatctggtgacgaaggtgttgtctaaggagtccttgatgtggaccaagtcgaaaccaccgtcgtgtctttccttgtggacaatagtaccaacacgacctaagttacgaccaccagtaacgtagactaatttaccggtatcgaacttgatgaaatcggtgatcttaccagtagctaagtcaatcttaacagtgtcattaaccttgatgtttgggtctgggtatctaatggttctaccgtcgtgagtaacaacgtatggaatacccttcttacccaattggactcttttgaccttacctaacttgtaagtagcttcttcatcagtgattctgtggacagcaaatctacccttgacgtcataaactaatctaaagttttcattggtggcttccaaagtgatcacatccataaaaccagctgggaaagtagtatcagttctaactttaccgtcgactttgacatgacgttgcattaaaatagctttaacttcacgaccattcaaagcatactttaatctgttccttaagaaaacgatcaatggtaaagattcacgcaatttgtgtggaccagcagatggtcttggagcgtaacaaccagataatttgtccaataaccaatggtgtggagctgctaatcttttaagatgcttctttctatacgtaaaatataatgattattattattgttattattatcacttacaaataatgtctatctgttagtaagcaattaatttgtttgaataagtgaaattgaagaagaaaatgaaaggggacggtcctgcatttttttttcttttgtttttgaatatccattattattggaatagaaacgttgtaaaatatatgtatgctgtggtattgagttaataactagtcttggaaagagacaaaaccattttttcttaatttttacttttgcagataaaaagatcgatattatgtcaacaatcagatcctctataaagtaaaaatgatataaactgtattgtcatgattaattaataattttcatttgagaacgaatttattataactatagtgcagttttattatgataagtatcatttatgatcagatattaatattaccaatatttccacgtttactgttttactttatcttaaactctaacatattgtagtgatttgtatttgcagaataaaattatcatgattcatcgtttcttgttttctcttctctttttttttttttcatcgttttcattagtattataaatatagtatattccttggatatcattttgtaacttttcaaagtttgattatgttcatttcataacattctacatattctaagatatcttaaaaaaaaaaaataaacagtaactctcccttatgcactaattaattcataatactcttagccccaggctaccgtcttaactccttttttttctgctatccttacagtgtatttaaatatgcatacggtcctctagccatttctgcggttaagttagttggatgcttagggcaaaaaatctctcaagctctatcacgaagtaaacacgaaaaggagaaccaaaacaaacaagctagcaagtaagtaagcattacgaataaatgtaaaaaagacacgaacaaaagatgaataaccattatacagctagaatctcgaaccctcctacataatgaaagggattcacggctgccacacaatagctaactaaatcttagatggccttcaacattcgaaatctgaaacccatgattcattttttttcttttactgagacaagaaaggaaagccaccaatattagagtggttggttccttagatgatacatcacaacatacggagagtgaccaagagatacattcaatctatcaatctatcgatcttgcttacttgtttcctcattgcaaaccaacataatacccaaaaaaagaaaagaaaaaaaaaagttcaaagaatataatgaccgaccgtattccacatagtcaaagagggagaagagtagaattagaatgaatggaatggtcaataataaagacttgtagagtgtagctatcactctcacttactatacgatttttcacagtgaggtcttctgtctttctctttttgtttctgttacataaacacacagagaagacagatgttcacaagtgaagatggtagaaacatcagttcacattaccattttctcaccctcccgttcccctgattgtgaccagtaaactgcgtataataagtttttacttaccggtaacagtatgtaaacattcatcttctactatctgatacggtgttcttccgtgagggaattctaaagctaaaaacaacaaccacaacaacaagaccctgttgtgtgtaaagaatacttgcttattttcctaaacaggagaccctggtgaaaaacacacgtaatagacaataccagcctaaatgtatgggtgttttctagattaagacagtctcgtcttcttttcttatttttttttctttatttttttttctttatttttttttcttgaagaactttcgatgtatccttaattgtttaaaagtaaacaactaaatattgtccgtgaaagctattgttttgtttattgatctccagatttttgtaccatttttactcttttctttttctatccttttttttatttttttttttttggacgaccccacgcggcatttaaaatacgacgaaattacaattgataaacaaaaaaataaaaaaaaagcaagacacaaaaatggtaatgataatgataacaataattaatggtaacaaattcaatggatctattgagaacttcccagattctctaattgatttgacacttatcgaacaattctttcccagtttattgtgtctctgacaaaaatgacgtttttgttttagtgtttttttcaagggtacacacacaataataagagagaattttcgtttttgtgtttgtctttttctttttctttgccgctctttgcattgccccatcaataatgcaggttaggacatctaattagatttatatgtctttctgaaggtcagtgattcgttcaaacgatggccttattatttggatcgtactcataataataatatatatatacacgtgtatgtatgtgcatgtgtgtgtgtgtgtttgtgtgtttgtataagcatgtctttatgtctttatgtctttaatgtggagatattgtttcttcttgtattgtaacatatattatatatacccttggagttctcttctctgtcttctcctcatctttgtggaagaaaatacaatattgttaatattgttaacattcctttatattccaaacaaatattactgaataagaaaggaaaggattaaaaaaaaaagaaaagaaaagaataaaaggaaagtattttagctttgagagcatcaattagtatactcattttcattggtccataatgtcagctccattagacgcatcgaaaatcgttatcacaccagttgcaaccccttctaaaccattgtcaaatgacaaactgatctttggtaagactttcacagatcatatgttgaccgttgaatggacaaaagaaaaaggatgggacatcccacacatcaaaccttatggtccattgtgtctagacccatctgcagttgtctttcactatgcatttgaattatttgaaggtatgaaagcttacagaactgaagataataaaatcgcactgttcagacctgaaatgaacatgaaacgtatgaacaagtctgcttccagaatcatgttaccaaacttcgacggtgaagaactgattaaactgatcacaaggttgattgaacaggataaacatttgattccagaaggtcaaggctactccttatacattagaccaacactaattggcaccactaccacactaggggttgctccgccagacagagcattactgttcgtcatttgttctccggtaggaccatattacaagacaggtttcaaagcagttagattggaggctaccgaccatgctacaagggcatggccaggtggttgcggtgacaagaagctgggagccaactatgcgccatgtatcttgccacaagtgcaagctgcggaacgtggataccaacaaaacttgtggttatttggtccagaaaagaatgtgacagaggtaggtacaatgaactgtttctttgtattcaaggaatctgcgacaggtaagaaggaactggtcactgctccattggatggaaccattttagaaggtgtgacaagggattctattttaactttagcaagaactaggctggaccctaaggaatggacagtcagtgaacgttattgtactattaatgaagtgaaagagaaggcaaaaaggggtgaattggtggaggcctttggatccggtactgcagctattgtatctccaataaaagagatcggctggaaggaagaatcgattgacattccattactgccaggagagcaaagcggtgaatttacaaaactagtagcacagtggattggtaacatccaatatgggaaagaacagtttgaaaactggtcaagaatcattgccgaattatgaaggaaaaactagcttagaataagagataaagtttatatatacacgtttatatacacacgtatgtatgtatgttttcttcgtttccatgatagctaatggcattaagtatattgataatgatagcattacaatttgttcatctgtttattcattcatctatctacttctttgtatatatttatatatttattaatttagccgccggaacatttcccaaaaaaacatttcttctgttgaacaaaatatatgaaaaacaccaaaaaaatgtctatcatttgcaaatcattgtaaaaaaaaaacagattgggacaggggaaacatatacaaataaaagacacgtgggaccaaactacaatccttaattttgggtttatttatttatttatttatttgtatatgctatttcacagacaaagaattctattattccagtgatgacaactctattttcatgccataaaacacaaaacattgaacaattactactgaaacacgtgattcacaatcatagacatacagaataagggataatacggcgctacaatattttctattctaaaacacaggttttgcattgttgttggagaggacaaatcacaatagcaaaccttaaatacttgcatttgtttagttttttattacatgaatgaagacaatatgttgtattattattgttattgttgatggctattgttttgcttcttttacatgattcccctgtttttcttttttctttgtcttttttctttgtccttgccttttatcttttgtctttgtcctttgtcctttgttcttgtcttttgtctttaactttgtctttaactctaacttgatctctgttaagaatgtgataaacaatagtagtagaagaaagtacactgccacacgtaaataaaacatatacaaatatacaaacatccaaataaatatatacaaatatacaaatatataaatatataaatatataaatatataaatatataaatacgtatcctcatattacaccggacaccaagaaatcttctcccttgatcttcttctcccttgattaagtgttctggtgcttacatcactatacccttaacttttttattactttgatttattttttattctatttcttttgttttatacttgactttgttcaaaaaggaatagatcaaagcaaataaaagacagcccataaatatatatatttatatttatatttatatttacagtcgactattactactttgttactcttcgatttttgctttttgctttttgttaaactcagaataattcaatgtcttcagaacctattcctcctctgaattcaatcactcattcgactgtctcccaaaattcctataaggaagatagcaatgacttgaataaccattctcctactgactatcacggttctgaaaataatgacagtttgaacaatgagaatgattatttgaaaaaaacagatgaagatattgctccaactagcaaaattactgaaatccctaggaaacctgcttctgcctacataactgtctcactcctatgtttaatgatagccttcggtggttatatattcggatgggatacaggtactatcgggggtttcatcaatcaaaccgactttcaaagaagatttggtcaaagagcagctgatggtacttattatttctctaaggttcggaccggtttgattgtatctatttttaatatcggttgtgccataggtggtattgctttctccagaattggggatgtgtggggtagaagacttgcactggtttgggtctctgtcgtttatatgattggtttagctatatcaatatcttctatcgataaatggtaccaatattttattggtagaatcatttccggtatgggtgtaggtgggatcgccgtctactcccctctaatgatctcagaagtatccccaaaacatatcagaggtacccttattgcatgctatcaattgatgatcacgctaggtatcttcataggttattgtacaaactttggtaccaagcgttacagtaattcaactcaatggagagtgccattaggtttgggtttcgcatgggccttgctaatgattgctgcaatgttttttgtccctgaatctccaagattcctaatcgaggttggtagaatagaggatgccaagaaatccattgccagatcaaacaaagtcgatgttaatgatacatcggtacaagatgaggtcgatctacttcgcagcagcattgaaatggaaagagccgcaggtaatgctacatggagggagttgttttctccaaaggataaaatcttacaaagattaataatgggtatctttattcaatctctacaacaattaacaggtgctaattatttcttctattatggtacctccatcttcaagtctgtcggtttagaagactcttttgaaacttccattattatcggtgttgtgaattttgtttccactttttttgggatttattttgtcgaaatgtttggccgtagaaaatgtttactatggggctctgctgcaatgatatgttgttatgcagtctacgcgtcggtaggtgtgacacgtctatatccaaatggtaaaggtcaaccatcttcaaagggtgcaggaaactgtatgatcgtcttcacttgtttttttatcttctcttttgccaccacatgggctccaatcgcattcgttgttgtggcagagactttcccattaagaatcaaggctaaaggtatgtcaatctcaatctctgcaaattggacttggaatttcttaatcagttttttcacaccttttattactgatgcaatcaatttctattatgggtatgtcttcatgggatgttgtgtattcgcctttttgtatgttttcttctttgtgccagaaactaagggattgactttagaagaggttaatactatgtggcaagaaaatgttttgccatggaagtcttctaattggattcctccagcaagaagatctgcagactacaatgctgaggagttggcacatgatgagagaccttggtataaaaagatgcttggttgaatatcctgcttttttgttgtttttgcttttattttaagtcaagcatcaagtcaacacccaaggcattctattattaacataatttctattaatcagtttattctgactctaattttatttaatttttattttatttcactatactataccttgtctaatcctgtttttatatgtacatatgtttgtattttactaggttaatgctactttttttttattgattaaatcaaataactaactaaaaaaaaatattaataatgtaaataatagtaacgcacaatctgcctgtttttattttcactattatgctttttttttcttttttcaagattttcttactatgtaaattacaggttgcagtttcatatacatgggtgtacgttcaaatcagaagaaagatttttcaaaaatttattaggttgatatgaaaatattaaataaaggctattacaaaattttataatacgaagatatataaataatatgtaattatatattagaatgtgatatagagtaaatcgtagttacaatggttcaatagagacccacaaccataaaatagataagcaaaaaagaacaaagaaaaggagatatattccattaaatcatttgacatcaactaaatcaatagagcaacagcagctaaaatgcatgcaccgacaccagcaaattccttagcagccccgttttcgttgacttgttgtgcaatgacaggcttggaagaagtggcagattgttctgatctagtaacttgactaacagtagatggtacagaagtagccaaggaggcagatttcttagattgacagacttcatcacaaattgtggatgtaacagtagaaacgttactagatgtgactgttgctgtagattcggctaatttctttgattgacaaacttcatcgcaaacagtttctgtagtttcagaggtgttttgaactgtggtagaaacaactgtggaagactctggtggacaactagtaatagtcgtagtgttaacataacgattagtaactgtgttcaacatagttgtcacattgaaatatttagaagagtcggtaacagaagataggacagaagaggatgtagtattttgaacgtatccttctgaagatgtagatactaatgaggatgaagttatagcagaggatgaggaagtggtagttaagttagcaactgcagggatagaggatgaaatgatgctagaggaaagaatagatgaagaataagaagaagaaactggggtgctagaagaagaaatgacagaagaggagaatggaattgaggaagatgaagcaactaaagaggaaggagaaacagaagatgatggtgttgctgaagtagaagttgtagaagaagaaggagtaacaaaagatgaggaagtttctgaagagacggtactggatgttgcggaagaagaaggagtaacaaaagatgaggaagtttctgaagagacggtactggaagttgcggaagaagaagagataacgtcagaaggagccgaaaaagaagaagaagctactgcagaggaggtaggagtgatggtgaagaaagaagaggaagaagaagtaactgggacagcattgatacctgtgacagcaatatcttctttgtccaaataagctttaagagatggtaagattcttgcagaataccaaggaacaccagttaacatcatttgaacagttgatggattaataccagttaaggcagtagtccaggaatcatctgcagtgttcatcatagcttgaaaaacaacatcgtttaaaacacttgggtatggttgatctggatttacctgtctaaatgaaagatattccatcatatgaccaagaatatcatcaacgtaaacgactaattcagccatttgaacatcttcagcggtaataggtaaagtagtaacagcactgactttgttgattgcagcaatagcagctgtagctgctacatatttattaactctaaccatttctattcttataatattatttattaaataattggtttagtcggctttatttgtttacacaaagacctgtttaaccaatattccagaagcggtagattaattcataaaaagaaatgatgcaagatgctggaactgtcgcacaaccacacacatatatatatatctacatatatatatatatatatacttgaatacttattttgtgaaagaaccataaaacaaatagactatttttttaaaaatagcttaaggtattgtctatatcagttgcaccgtttaaacgaataggtgcgaactgaaaaataacagttgtaacctcatgccaatgagatccaactaagaattttggtttaaaagtaaaaaaaaaaaagaaaaagaaagacatacactaaataaacaagaggacacccatccatcacaccactaaatagataaaattagctgagtaaataactcttttaaagaacattactatgtggagcataaagtagaaaaaacatatatatggtattcatattctcagttcaataagcgatctatagacccattacaggtgaatacctcgttcctaaaacctactctttaataaatcgctatacaattagtgaaaaaaatctaaaatacaattatcaaaccaatttaccattgtattattctaaccctctccttgaaaagctaattacctaatacatagcttatgatctatactctatgcttcgtataaaaatgcatattatactaaataggagaaaaaaaattttttgatatatagagatatttgaggagggaaaagaaaacaaatgtaaattaggcaatactcagcgatgtatataatcatgtacatttttatttatttccagatttgacacactagggggggaaatgtatacagattgttcgtctgtagttattacactcaatcgctaattatttcgactgccctcttacctcgtataataaagttcaatgcaacctatatttttttttgaacagtcttgtttgtttatggtttttgtttactaaaaagtcttttttattatgggaacaggtgataaaataatacaaaaaaaaataaaataaaagcaaaaagaaaaaggtaaccattttttttgttatcgcgtgtattcaaatgtttttcctaaaagggtaacacatcgacgaacaaatctcccgtttagatcaaagaactgaaaaaattaaacgaacgaacaaacaaactttaaaaactctatgctttacttgtcgatcgtttacccaaaatggttacactgttttgtaatgttgtgtgttctagtgcaattgattctttaaacatataatactttaaaatcttgatctgtgtatattccattttaatcacgtcatctaatatattctgttatcccaatctctgtcgacagttgcatttttcccatatttgaataccacaataccaaaaaaataatctatgagttttttatcatcaaaaaatttcgtatgatatgacatgacagaaacagcatattgcctccatgtttagaaacttgcagattaaatagttgtgttttatgcaagatcgtctattcagtttatcaataaagattattaacagatttgtcatctctagatcattcatcgataaacgtattattaaaagaaagaacttgttctgtggtttattttaacatatatcttagtccttctttgcacaaggcaacatttattcaattattcaactaaataagcctactctacttgccctcttcgattatcttgagaacattgaaaccgaatctgacactaattccatatttctgcagattcttctattgaatccccaacatcattcacaactaatcctgatattcctaccgagaatctttcaccatcaaatactgctgcactaccatctttcgaatattcctcagacgacccagagaacaacagtgttcaagaaactaaccaacctattgattcagtcctaaatgatgattccggctgaaatagaatgaaatagatacaacaatgaaattttagcagatactatacaataaaatgttaagtaatcattgtttagatatcaccaaacattgatgcatctgtttcgtaaatattttatcgttagtagaggaaaatggcttaatatcaacatatataaagccaaggatttcctcatatcttatttttattttatatacacgttttgtatattattatttctatgttgtatatagagaaggaaagtaaagaacttcaccttaattttgtacactaataaatatacaaccatcataaaaacatgattgagaatgtatcctaatatatcaattaccaacgcgcattcattctcaacaattccagttgtgatcaccaacgctgttacaatgtatactaatattcttcctccagaagaggtgattactcaatatactattaattagtatctaataaaatctcattgttctaactattttttgtagaacattctatttcaagtaaacagagtttacttccactacaaacacttattttagtcagcatatgttgctggaacagctatttttctgtcataatttgtgatacttattctgtgcttcgtataaaaatacatgttttcactaggtgagaaaaattttcttatatatggagaatagatggaggaggaaagagaaaaaatacatataagcatttatcataaagttattgtacacagtcaattgcttgtttcgaacaagaagaatatggaagaacttaaatataattttgtaaactataaaaatataactataataattgaagatgtttactatttgtcaagtaattacaggcatccacaacaaatatcttatttagaatacttctcttttcagattgtttttataaagtaaaaaagaaactagatactttatttaaaatattgatagtatatataacggagtaactatattcaaaaaaacaccaatttagtaaaacaatgactagcatgtttaaccagtttggcattcattgtcaattccaccatatgcatcaacatatacctcacctaccattatagaatcaatccctggagtagaactatctccaaatgaagcacaaaatttactttgaacactatagtagggcatatcagtacatggctgaatttgagatacaaacatatttccaatgtccatagctccactttttgcttcattttgcatatttgccttgaataattcagcagcaacaacatttagatcatacaagttgtacgaaagttattcaccatctcctctcttgtgaaaagtctttttttgcgtagtaaattctttaaatgcttcagcagatgctaataaatgtcttggatgaactatagtagttatcattgtgtcattataattgatagaccaagtcaacatattatcgatgctaccatctcttttataaagagatccctcattatcataccaaattgctggaacacctgtaatattgtcaaaaaacttccccaaaggttgattaagagcatatacatgatcttcaactaaaggatcagacgccaaagttaaatttgctgcaggatatggatgttccaacaatatatttcttttagcaacacctgactccttccaccattgccaaccactactagcaccttcagcagaaagaacggcactaatagaagcacaagcggcaccaataacatatgtcccaatacaccaggctggtccagaaagagtaatacctgatattgctacttcagcagcaggattgcaaatttgaggagcaattaatctaactccataagcaatatatccaaaaaaggtaacacctgctgcaagtaatatactcttccagttaatacgttttattagatatgcagttgtgagaaaagcaagtagtagtataataacaatatattttttgtcttattaatcggcatcaccatcaattctatttaaatattctcttttaaaaattctttaccactttgataatctctatagaattacttacttttccaatacttagaaacattcctataccttaaattttcagtaaatagaatttgttttgcatttgtgaaaaaattattaaataacgtgtatatatatatacatgcatagatatggttataaattcagataaacgacatatttaaatttttgctaaacttaaataaataatatttagaagttcttagtaatgcttatacaaaacaactcatattattatttaatattgtttccattattattattataataaaaaaagatattatccctgctggaatgatatactacctgtttaggaagtaactccttatcttaaggatgaaaaaatctgtatcatgcacaatccagtattgtagagataaaatcaaataaaatcaaaacaaggaataatattatgaaaatttatcaaagaataaagaatatagaaatggacaacattatttattaatttccgaatctggatgaataatatatatacatcgtgtctttttatttcttatatacttgaataattgttgtaaggaacctaactggaaatccagtagatacgcaattccgagggtaacacctgagtgtctgggtgaaggattggtacggccatgtgcgcagtggcttgtataaggtattgaatctgataggaggatttccagggagtgataattatatcaaatcttatcaagaggcctttgactattgagagatatggcaggggtaatcatcttatttaaatacatcttagtaatgatattaagaagtaactcttaatatcatacaagaaaaagaaaacaacaaggagaagtaataatataacatcagggttattaattagtgatatatagagcttacgtaagagtgtttatagttgtactaattgatatgattcatccatttacatacgacaactcttacatatatatagtatatacatcttacaacgaactttcgtgtagccattttttgcatttcgctcgaattgtgataacatccaggggaattgtgacatgactttgtcttcagaaacctgataatataataatgggttctactgtttttaaaacttccactatttaaaagagaaatgcaaagtggcacaagtcagtcataggaaatcttttttttgaacggttgctattatccattgttgcagatactattactccaccagagctcttgacaactatcgaagtaagtttaatcatggcacttatcaaaaaagaatctatgctacatttttggaccaccttcgttcttagagttattttcatagcagcatctatactgttgattttgtggttttattctataactgttgctcctatatttggtggtaggtcgtggaaaaagaaagccattattggagctgttggagttgtgctaattacagctacctttgcaaaaacctatcctgttctttttaaacgtgcacgttggacctttgctgtaggctcaacattggcaggtttagtgttagcagctggaagtgtagctattccatcctggacagcagccatatgcttagctttttcaagtcctgcttgtgttcctgttacagattctattttgattgctgttgatgttgcaattgctgctgctattatttggaaaaccgaagattttgaaatgcataaaaaacggagtacagctgctaggtaagtttctatttttggttctgatattatagctttgttacattattttatagacacaacgcaaatttcctcatctacaagagaggcaattagttttgaacttgttggagagattagtcaggttaatcctttgcaaaaacgagacagtgcagttaaccataattttatccagtttaatactacgttcggggttcatattgcagtatcaccagtgttatctattgaggagttagcaaagcatattctagttgctgagctaggtgtgccttttgggaatagtagtttggtaaaacgtcaagagttttcggttaattgggtatcttatggttgggataatgcaaatcatgatttttctcaagagtggtataactatgagggcggtaatttcgattctctattagaagatgctgttcaagacgcacttggcaaatatcccgattggaagtactgcgtggcaccaaatgatttaaaacgaggtgaagcaaccaattatcaagataatccaggtgtaggcacaggaacagggaatgtcatgcacggtgaagtctattttaatacttatggcggtattgatggttattgtaatgacaacgaagacggagcacagaattccagtgattgctagttttcatatttgtttcagttaactttatttcttttttgttatttacaaactcaatatttgcttttttttaaatataacctgctagaatgatttcccacccacttaagaagtaaatcactacttcaaacaagagaaatgtgtgttttgcacaatccagtgttgtgaagatatttcacgaaactcaaaatcataagaaaaagttataaaaaacttttccaaatgcaaagaatatataaatgaataactttacttattgaattctcggtctggatgaagcatatacatacattgtgtttttatgtttcatttatagttgtataattgtttattctctggacagagatcaagggaaaatagtctataatatcattgaataataatataaatattgttcgtaaaatatgatcatcaatgctaaagaaatgtatattgatactcttcctccagaggaaatgattactcaatattctatagtttagtatctgctaaaatctcattgttctatctatttctttttagaagattctatttcatagaaacagaactcattcagtagaatctacaacttctcaatatacacacaactgtccttttatctttttccgttttatttttttttctcttctggaatccaaattttcttaaatctcaaaaacattttcactcaaataaataactcacacagatatggaccgctctacagcgcaaatacataaacaaaacagatatatagacagttcctcagttgtaatctacctactccaagcatttgcgtgatataaatataaacatacactaccattcaatatgatataattatgccaaattacatctagcagttattcataaatatccttattccagtcctctgagatatcataaaacgtagagaacacattcacaacaatccacgtaataaatatagtattactagagaatgtgtatataaatggaatacacttatttctatgttatgattactttatcactatgagtatttaggaaaacatgaacacatatactcattgacatcttccatttaaatgatacaatctgatatcacacattaatcccacatagtaattactttagtgccactatcatgaaatgtacaatacattcatacgaatgaacctcacactataattatcaacactgtacaaactaccattgcattccataaagaactgtttgtcattgcttgtcgtcaattggtaaaattcaataatactgttatctattcttacaactctaacatcgtatctgataattaccaatattaaatcaaataataagcatggatgatcttgtaatcaaatggtaattacaaacaaaaatggttcaagtatgggatatacaacagaaaattggttgtttactgatttgcattggatctgtggaaattattttacctggattactatatatatacagttggggaagatggaacagtatttgctttgagtgttactatcaacattataattgatatttcttactttatacagtgttatctcatttacccaaatcaagaacatcaacatagtcaaagtaagtaattttcaagacactctcagatatttaatatactgaagcaagatgttaatttctatgaaacatcaactttgaacaaacggctaaaggttcttttattatgtctctttttctggattaagattaatgttgtatggtgtattcttgccataagtccttttttttctgtgagttacacgtgggtaaagaataaaatattttactatacattttatgtataataatgcacaaaaatattgaataatcatctgggttttctttcgcaaaaacatatataggttaatatctagtacagtcacgtagatcattctccattggttctagtttgccttatttctataacgaattgtaatacatgcaataagttccacattccattgtttttagttacaattgttattttttcagtaagtcgtagtgcaaaatcatgttctattgaaatgttccagttaaataagattataatgatgttaccagataaaaaaaataaaggtaagtatatcttctgtttttatgaagtctcaaaaaagtactggtgtatatcagttttgttgaaaattaggtaaattttactacaagatttattagtaatcaagttgagttatttatacatgtatatgtatcgaaatgattaaaagtcgaattgttgttttgttaattaaaatttattaagataaagaatgagaaagagttgaatgtacaatacatacacaacagcttaagtcagtatatttctaaaatgtttgacttcttagatagtaagatgttattcaaaatagttgtaattattaagcgatataatactagtgcttgtgtataaattaagtgtaatagtgtaaaagtgttttgagtgatgatatatttcttggttagaatataaatatttattaatgttgataacttcaaaaatatcttcaataaataacggtaatagatttagagattatcatccttttttatcttatgtcataatcttatgttaataatcaaacagttcattttaatataatgtagtatcataaaataattctgttaaattaatacaattaataatctagtagtaaaatgtttataaccgagaatgtaattatagacataatggtagaagaattttaaaacatttataacactgtagatagtacaaacatgttggttgtattcttgttttattaattatctttatattcgtaatattgttatttaattagagatagtatccattttagagtagacactatattagtcttagtataataattagcaagccattgtttatagtcaaaaattgtttagcttgtttattatccagaatttttaaagtaataattcattttaatatctattctagtaacaaagagtaatagaattattagttgatcgggttttgaatggaataaataatattcattatcgtcgctacaatacaattaatgcatccatgttagttagatagatcattcactgttatcatgttatagttagttttcagtatgttcatacaattatcattctatatatataaagtaatatatagagtcgtttcttttgtattgaaggcattaacgagaagtgcatgaatgttcttgaataatcgtatttatatagtagttatatcacaataatgcattctattgatagatatgtaccctagtaataatatatgtattaggtgaattgttgtgaatgtaatctcatggttaacaatatctcagttggttgtattgagtatatgtaaatataggatggtataattacattatatcaaataatggtttgctaatgttcaaagttatgtgacatgaaagtgagtggatcatagttgattgttcacaagccagtgtgtctatcctgtttacatatctgttggagtggttgttattgttgttgattcttgcaaaatattttttcgattttaaaaaaagtaagagtgatcttggatgggaagagattgatagtcaagaggtgatggtatgtgatattgagagtaatcgagtaaaatgtgatataatatatatcgatgatagttataaaaaaggaatatgagatatcagtataagaagacctgtttagattaagttaagagtaaacaattcatcagtataatttgttatgttattttcatttaatgtgaatgtgttttatatcgatggtaaatgcatagtctaacagtgatgttatagagttattaagtgaataaaaatataattaaagctagctggttgataagactagttcagttcaaatagatgttaatgttgtaaataatgttgtatgttatggaatacactgtttcaaaaaattgtattagagatcgttagtgatattatcatagtaaacatagatataagtattaaacatcatagtaaattgcaatctagagtaattatggtatgttatattggaatatgatatattaatgtaatatttaatacagttattgaataggaataaagacaattcagagagtacagaaaaggtttgtgaaactgtattaaagtagttatattatcagttgagaatgtgcattcacgtctagcttatactttatcatgctgttaagatcaacacaggtaaactcaatacattatatctctcttttaattgatgaaagatacttccatgttattttttttttttgcttttcatattttcattccagagatattgatagtgtcacaaggaagagaagaagagaaacataaggaatggtaatatagagagctagagagtagtagaatctggtggtggttataaaaatgttgaagtagaacatttgtaaatttggaaaatagagagtgaaattattatgtagttaaaaaaagataggatgggtgtggatacaactacccgactgcactattttttgtattaaatatgtcgaaatataattagaattatgtttgatgatctaaattcaccgtactaagtaattaaaagttataaaaatttatattaaagaagattcgaagatagattccgaagtcttgcgtcaacatctatgaagcaatattaatatatagttggcggctgctttgtacaatttttataagaatctatcatctcttaatatttatatgtcgttctatacttgattttttcttttccgtccttctttttttgtttgttttttgcatatataatatttaagtatagttattaatttcattcttatacaaactttttgaaaatcattaaaaaagtccagacaaaaatttgtaaggattcttataaataatatacaaaaatatagatattaattatatctataaacgtttacaaatcacataatggtcaattctaaactaataaactcattatttttggctgatcttgaatacctaaactgatcttaagttattttattttctgggcaaaccttagaagatagaataccaaccttaaaactaataattacctctggcacattctctcaacaatcagagatttcttaaatgaaattttcagtaatctgccgccaacgttaatttgacgatcatttgttcgaatacacttacgacttggcttcaaagttttggctactccaagtctttccccttaatatagggtgttacctgtagactgcgcatttcagtattccaaatagagcttcttacgaaatttaatacaactaaccattgtgaagaactcaaattaagaaatcaaaaattaagatagtgaaaaattctagcattagcatctgcacttaagatgctactaaaaatcatagtcatgattaattagtataacccttcatatataaattacgagtatatttttttatcttcttatataatggagaaaactaagagtatcatgaacaatatttataagaaataattatttacaacctataaaaagaatttgtgaaattattactttgttttcttatcttgatcctaatataacattccatcttcgagacaaacaatctttctcatctatatatatatatatatttttactagcctatattataacaataccatcagtttgattttaagtaatacctatcgaattatcttgaatcagcttctaaaatactagttaagatttatttaacaatttttctatcctaaaaattgaagagtataacgaccatcatacactcaccaggttaaaattggtaaaaaaactcaaaaaaacgataataagaatagaatgcacgaaacagttgatacatttcttaaaaaaagtacggtattctttgtaaatattgttcattttgcttttcttcaatagttagacttaagattaagacaacttttcataatacacgatttaaatctttaattcagactggtgcttataattttagtaatgttagactagatttgcttctatgtcaaaaaatcgattaaaatatgacaccacctacaccatcacacttgttgacggtgacagttcttcgtcttcagaagttgttgatattgtcaccccatcttcatccaccttatacactactgcctacaaccatctaaaggagtaaaaatactacagtcctaacaaatatattatattttcttttgtttttctatacaactgtccaataaaaataaaacaaaatccacttgtttatattagttttaaccaatatatagttcagagtacttctcttttaaaatcattttaaagatacactcaaaagaatacttcacatagtatactataaacatctactacctacaaattcttatattttaacacatattattttttaattataatacttctcatttctattttatactttccataaaatgtactggaaacactctataaaagtgtctatcctacacactgaagtatcgaaagactggatgagttttttctgtaatgttaactctactatctagccttaaacaggattgttacatgctacaacaaggaggaagacttacgtacctagtctatcttcctccattaggactccttttaacagttcttcttttttcaaatatttgcaactttgaataacaatgcgatctcgaagaaattctatccactgaattcggaaaaacaaaacaaaatctaagctttttttaatggacatttccctttttggaataaagctgtagtgtttttgtcataataatttttactctattgtcaacggctttcgagctaaatctcacgaaaaatatctgcagtcagagaaaaaaaatttttcgacttgtaaaagaaagcaaaatctttaatgggacatgtaaaatccttaaattacacaactactggaatcctgttgtaggtagccatttttcttttgaagagacagagattagtcctttcaatcttgaatttcacatgggttagataataaaacaccaaataaacataaataaatatctcagaaaacttcccaattaattacttttgttaagacccctgctagccaaatctgttttaatgatagagtgttttctattattatatttttgaaacagacatccaacaattactacaaatcacttcgttttccaaggatacctgtcttcgattttctttcatatagatcaaaacaggttatgtgggactgttgtaataatagtagtcatgcttctgcttttcaataaatcattctaaaatcttctggatttgtcaaaatccttagaaaacacaatcattatgaataatataaagaaactcaatcaaacatacaacaaatatgtcgaatataccttttttatagcaatgctaattatgaaataacaaaacaatttatcataacaataatatttctgaagaatacatctgtgtaaatatagaccattttattttttttagattttcaaatattatcattaattatattaatatgatattgtcttcaaataatcagtgatacacttaggcattatatgcaataaaaaacacaacaaaacttttttcaagataaattttatactaatggggcgatattatcaataaagtagcagagatttctaatattacacatgaataatcattcaaatacagaataaacacaagttacagcgagtagtcttcactgctaaattaacacttggacaaaagagtggttttaacaataaatttgaaagataaaatctcttttgagccatatattgaagatgatagcttactaaattttacaattgtaacataaaactacaaatattttatggtaatttggatactacaatatgaaaatttgttattaaaaataagcaattaaacgaaaggaacaacatttttactttgaattttgaaaattaccaaatttaaggaatattgatgtcctatatctctgttaagtgtaaattaaccttagtatacttggcaattaaaacttgaaaaggactctaataaataaatatccttagtcgctagtaattattaaaacatctctattatacgtaaaagcaccaaattcaattcaagatatagctaacttacatttatctgagtattattcagttttgtgatttgttataaatctattaaatctttttagtattcctaaaataacaatagcaatatacacttgaattgttttaattttctttttgcctctaaaagaataaatatactcaccgatattaacgtcgttactatgtctctccaagatactgtaccgtaattaatttttgcttttcactatgtttctaaaacaatacttctaatacctcctcaaatttataaagcatgaaaattttgatggtttcgtagttatgtaaacattttcttattatcattagaattagagcttttgctcttcaatgaattaaaatatgttcttaggacaatatgctttataacataatataaaagatgtttacttatatctgttagaagtgttttttgtttttttaaagatctctggatatctgatattcaactgtaataatataaaagaatctcataaatgactgtatcaattttccctattaattgaatactaattagaaatatgcttgggataaatcaatttgaacttacaatttcatttctatgaacttcattttttttatataatacaggatacgacaatctcttgttatactaaattcctatgggtcaaaagattttgtatatatcataatgagtatgttttgggcattatttctgttaactataataaatatttatacaataatgaatcaactacttcttataggttgcggattgcatacattccaaactagaagaaatgattcacttcctaatactacataaaaacattgatgcaataacatcaacatctaatacgattaaaaaaatgaatgtccaaatttttctgatcaaaaacaacagaaaaaaaaactgtttttcttgcgctgaagtaatgaaaaaatgcatttctttcgaagtgaaaataaaacatttaacataaacaactttatctactatggatcgtcttaaaaaactttagcttacgtattgactggctattcttctcaacaacaccatattagttttcaaagaaattacaaacttggtatccactagaattttccaatccatttgaaacaaaaacaataaataccatgaattattgaaacaatagctatagcatattcccccttgatgtcaaatcacaattaaaattcataattaaaacgtttatagtattataattacctctgcttgtttggaaacatctattagcccattttacgatgaaagcaagtagaaagtttcatgtgagtgagatatttctgttttgccctcaaccaatttttattttgctattatgtggtcgtttaaaggaaaatttctcaatgtttgttccaaacaacaacaggcaagatgtcatgcacaaaagtagtctaaaacaacatatttgtgccagttgcataaatgtcaaaaaggaaattgcaagattcgaaaacaaaactactatttaccatgaaattatgcaatcttaaattcgactacgttattatagttaaaaatgccaaataagtgaatgcaaataatttctaggctttagcatctattgcaactgaaatattttgataaatgataaagattggcagtgttgtattgatgctaactttagcaagttaaacttaaatcaggttccatagagacaataacttatgtggagttatattttaacacatatgatagaattgatgattagcacagtagtattgaagatagttggtttatcttagacaataatgaattttatatctaacatttctattacttgagccttagacaaattggatctccattttattaaaaactatgcagaaaatatatatggtgtttataaacaaacacacattgatccttcactatttctttttcttgaaatattttcttcaaaaagttgttttaatgatctacaaaaatcacttttaaataaaaaagtagtgattatctgcctattattcaacagttttgataagtatactaataattaaataaaaagaaaataaggcaaaagctagtggatattattttacaaataaaataacagagagacttttcttacctatggttataatattatatatatctagaatctttattgctatatcataataaatagaattctaaaatttattagttcaccattaaataaatatgaaatccaacctttattaatgcgtttaaataatttatatattacaacatccaaaatttttcacataatactattaatacttacaaatgaataatatttaatgacatagtttttggaaaagataatacaaagtgaaatattaaaaactaatgggtgtatattatatttctattattttgtatattttattaagtcttaggatataattagatgtaaacatttcaagtatatataatgacagtttgatattatttatttcacacaatacatcataactaaaagttggattcttataatacgtagttagatttacaataagctgttaataatcagtggtgtgtatttgttacttgctatattggcaatcttacttaaaatatacactaccattagattaataattaattatactcccaggaagtacattcctataatatttagtaactttggtggtttcctcattagaaatgtcttcaccaagacgctggatagattatcaccaagtggaataatttttggtttatttgtttgaacgttattgaggtctacctgctcaggtagttccacaaggtcgacagtctctgggtctttcgatattccttttactttactcccattcagcttagttctcttagatatagggttcccattcagtatttgattcaaagatacagatcttttcattttcacatctattggagtagtttgattgttttatattgtctctttagagtatcaaatatgatcattgatatatttcagtaggatcttcagatatttggtctctacgatagcattgaaggattccatatagatagtgacgtattcttcacaactgaaatgaaaaaaatatcgtccttgagacgcataaagttgtatttaagaaggtcaataacttatacaacccctgtagtcatgctttttaggtaaagaaaagaaggcatcatgatgatgagaatgaagtaaactactaaggccatgctcgtagtagtaggacaagattcaatatttttaagtaaaaataaattagaccaactaaaagtgttctgtaaataaattatatttaaaaaaaatattttatacaaaaagtaaataaataaaaccgaggttagtataaaaaagagaggcatttgtacttgtactaataatcaacaggtgctgtaattttttatactaacatcagacaatcaccataaatgatatattacagcgtctgtcaattattagtacaagttcaaatgcctctctaaaacagtatcataattagatcaaatgaataagagccattaaaatagcgctgaatagaacatctgaggtcaaactagctgccaaaccctcatattttgcagctgtaacactttccgcagaattagaagcagaagtagcaacacttacagatggaacaacattggcatgggcagattccatgcttatgtctgaatgtgcagtagtggtagcagcagaagctgtaacagaacctgtcttagcactttctggacatgaaggagtgtatgtagtgataacaacaccgtctgtagtataaactgtactaactctcaacactggttcaccatgtaggacagtttgaccgttttgggaagaaaacgaagtggtagcggtggatagtgagcaaattggacattcagtgacatctaccatgcgtgtgctctcaacaatagcggttgtgacggagtgagcaacatttgttttagcagatgcagcttcaccagcagcatgtgtcttactactggcaccaatagcagaaccattactgttgcttggggtagatgttgttgcagtagtagctgatctgtcagtggcatcaacaacagaactatgactgattgaggtagattttttagaaatggtagttgatctgtcagtagtattcatagtagaaccattactgttgcttgaagtagattttttagaagtgatggttgatctgtcggtagcatcaatagtagaaccattactgtttgaagtagatttcttagaaatgatggttgatctgtcagtagcatcaatagtagaaccatgactgattgaggtagattttttagaaatggtagttgatctgtcagtagcatccatagcagaaccacgactgttgctcgaggtagatgttgttgcagtggtagttgatctatgagcagcatccatagcagaaccattactgtttgaagtagattttttagaagtgatggttgatctgttagtagcatccatagtagaactatgaatgttgcttgaggtaaattttttagaagtgatggttgatctgtcagtagcattgataccagaaccacgactgattggagtagatttgttagaggtggtagttgatctgttagtagcatcaatagtagaattatgactgttgctagaggcagattttttagaagtggtagttgatctgttagtagcatccatagtagaactatgactgtttgaggcagatttcttagaagtgatggttgatctgtcagtagcatcaatagtagaaccatgactgattgaggtagattttttagaaatggtagttgatctgtcagtagcatccatagcagaaccattactgttacttgaagtagatttcttggaagtgatgattgatctgtcagtaatattcatagcagaagcatgactgattgaagtagatttcttagaaatggtggtagatctgtcagtagcatcaatagtagaaccataactgattgaggtagatttcttagaaatggtggttgatctgttagtagtattcgcagcagaaccataactgattgaagtagatttgttagaagtggcaattgatttgttagtagtattcacagcagaaccattactgttactcgaggtagatttcttagaagtgatgattgatctgtcagtagcatccataacagaaccattactgttgctagaagtagatgttgttacagtggtggttgatctatcagtaacatgtatagtagaaccattactgttgctagaggtagatttgctggaagtggtagttgatctatgagtagcatccatagtagaaccacgactgtttgaagtagatattgttgcagtggtagttgatctgtcagtggcatcaatagcagaaccattactgttgcttgagatagatttcttcgaagtagcagaaggggtagaggatgacttaggtttactggaagtactacttgaaacagatgctttcaaaggcatgacattttcagggaattcaccttcataattaccaggaggtgcgtactcacaaacaacataatcacggtaataggtgccacaatattttacagcacaaccaacctccttggtggatctccaaacaacctgtgtaaaatgtccagttgccatggaaaagccaggatggctgtaattataatgagcaatttcactataccaggcgtccacagcagcgactgcattaggaaatcccagggcaaggttttcaccgtatggaccatgagagtgcacaagtctaccagaagaacaatcataaacggcagcatacttctcagcatatacagctaaagtattagaccaggtcaaattaccagtatcaacatgcaaagctctcaacttattgtgtgcgagaacaacagcagcctgttcttctggagtcaacgcatatttagtataatcagtagatgttgttgctgtggtggttgatctgttagtagcatccatagtagaactatgactgtttgaggtagatttgttagaagtggcagttgatctgtgagtagcatcaataacagaaccacgactgtttgaagtagatttcttagaagtggtacttgatctgtcagtagcatcaatagcagaattatgactgattgaggtagattttttagaaatggtggttgatctgtcagtagtattcataatagaaccatgactattgctagaggtagacttctcagaaatggttgatttgtcagtagcatcaatagtagaactatgactgattgaggcagattttttagaagtgatgattgatctgtcagtagcatcgataacagaaccattactattgcttgaagtcgatttcttagaagtgatggttgatttgtcagtagcatccatagcagaactatgactgattgaagtagattttttagaaatgatggttgatctgtgagtagcatcaatagcagaaccatgagtgttggttgaagtagttgttgttgcagtggaggttgatctgttagtagtattcacagcagaagcatgactgttgctcgaggtagatgttgttgcagtggtagttggactgtcagtggcacttaaataagtaaactgggccgttgatggaaagaagcctgaccactctccaggaggtattgtgtaaacagggttaggatttgatgtcggagttatagtaattggagctacagtatgtgttttttcatatagagatatagatgtccaatttacgggggcggttacccagtaaagtgttgggaactgaagagttgcataagctggtttcagaggcatgacattttcatggtatttaccataatcattaccaagaggtatgaactcacactcaaaaaaatatcgactaggcaaaccatcaacaccgggccaatattcttgcgcaccacaaccaacctccgtggtggatttccaaacaagctgtgtaaaatgtccattatgtaagtaaggcaaaaggtaaggatcgctgtaattataatcattaatttcatcaaaccaggcgtctacaccgctggtcagaggaccaggtcccgcgtaaaagtttgaaccaataaagtagccgtaatcgggagcgtcttgaaaaacagacgtcttgacattaaattcgcaagcccaccacgcagcccgttgggctaaagtatcagaccaggtcaaattaggagtgtcgacaaacatagatctgtacttattcattaggtccaaaacagccgccttttgttctggagtcaacatacaacgagcatccttagatgcattatacggattattcacaggccatccgtccactgtggcaataggacccttaccaccgtgagtagtcggtccaagataactagtaatataagatacttgcggttgcgaataactaggaattgtttcagtataaatagaaatgtaataagatgtttgtgccttcgatacagcagaaaaagcagctaaaagcagtgccgcgcacaatgataaggcacttgagaccattatattattttcaaatattcggaattattgacttttcagtaaaatatatagtttggtgagtatactttatggcgttagttttttggttatttgaggtgattcacttagttcggttatactggtagcatctgggagtataacgagatgatgctcatgcctgcaagaagagaagcaagaaacgaaagaatattcagacataatccatagtagttttatataaaaatgtgctcatgacttgcaataaaaatgattgtctaataggttctaaatttttgactgaaccagaataaaatataaataaagttttgcaataaatcttcaatgataaaagtgtgtaaaggagtagaaacaaagaatgaagaaaaagatctgtaatcttcaacaattggactaaaaatctaagtaaagcacaaaaacacagcatagctgatcattttattatctctaataggaaaaatatcactgtgtggtagtttctttaaacaaaaaaggaaacagaaaatgttgagttctcgaaaacatttccaaatggagaattaaaaatattgtttattgtttgggcattttcacattgcagaacaatagaatcagttttgtctagatactttacttttgaagaacataaaagggaaagtttacaaatttaagaatggacaaatagtttttttcctttttgctattgtgttggaaacactcgtctttgtatttgatgcaacgacaaaaagaataaaagtgaagaaaaaaattacacaagtgggaaaagagataatacagacaattctaaccacactatagatatacatgtctctttgtattctatttttaaatttttgcccctgaattattttagagaatccccactcttacaggatcatcgcccctgattaattagttatttggcatttatatctcttttttgtatatatcacaatattctatagtaaatcgatctatagaatgtacaaaatttattacttcattcacaatagaatattaaaatttttggcagtgaccgtgggatcgaataggaatgtataatttaaaaaaggggtaaagaatttttattgcattgttactgtttatacataagttatataaagttatacactataagaaccatcaacaattttttttctttttttagttcgtattgcaagaatcagcaccttatatgacgttagcatgtagtaatattttttataatattcaacaaatgtagtaaaattgttcttttgttaaccaagaatttattatttaaagttattattgttctattagaacatctattatgataaagatctaaaatataattattctcctggcagatttggatctcaattagactttttagtgtgatattcctattcctgattttttctcttttttccgatctagtataagaacaatataatttgtaaaattcaaaattctccatttaggtggagtattttttctccttttcggatacacaatatgtaagacatgcaagagtactattgaactagaaaaaatgacgtataccttgtggaatccttaaaatcttttacaatgtcgtttaatgatagctatttggtttaattttaagacaaacaagaaaaaaagatgattattattatattcgacctattgttatgatgttgtttatttatactaggtcaaaggatgataggaagtttgtatcttttcaaaatagcaagacttgataacagagcttttctttttgttttttgtttgccaattggtggttgaatgaaatgactataatagatagtatacaatgaactatttttaagcatgttttttttttagattatgggatttattgttgtccaaagcatcttcttgtactagtatttaggaatatttctgttagtaactgaaatgaggtatttttattcctaagtttcgtgatatgtctaaaaatgacaatttaaaaacaaccctaaagttctatggcttttgtaaagaattgacttacaatttaaaaaataaaaccaaacacaagtccttgggacaaaaaataacaacaatcactctaggatgattgctaactgaaaaaagaaataaactttgttggttattttgcttgtggaattaaacaaagtacattccaacaaataaatgctataaattagataaatactgaagaataaccttcttaaagaagataataacttgttttttctacttacttaatatattcatattaaaacaggaaaatataattaattcatcttgatatgggttcaagcagaaaattagtttctttgtcgagttgcaaaactatattcaatccctcgtttgatagaagaagagttgaacaatcaaacttgttgtgattttttaccctaaaaaagttaaacaatcagataaaaaattgtccaaatgtagacaaaatttaactggttagaaattagtattaagtatttttacttttgccaaaagttttctttgcttttgttattacagaataattgaaaagtgaaatgaggtttctgtggtaattggtctgaatgtgtgtttacatgacaagaggatgtttttctgttttactggaacgaacaatagattttcaaacaacaaaaaaatctttcatgaaaaaaaagaataatttgagttagctaaatataaacaataatagatgagaaaaattttcaaagaaatttcaattttttctaatactcccaattttttattttgatatagcacaactaatttgaattcacattacaagtgtagatgttacttttctggaaatataaaaattcttcattctgtttttcagaaaattacaataattccaagttgtattttggttagtgaaaattcgccatgcagatagtgttgattagtaagaattgctattgcatcttcataatatttggatagaaacaatacatgtattaaacaggatcgtgtttcttttggatgaataatattagtatacatgtctttagcgttggtgatcatattatatgtcattgtgatgtcaatatgtagagtaatttcccctcgatctcttattttggaattaataattatataaatgtaaaagaagcatacaatataacgtaatttatccaggttgcaaaattaataagtaaagtcgtctacttatatgtgtttaccttttggcaatttttcataatatattaatttattttgattctgtttggtcttgtctctgtaatattgattgtgcaaaacaaacatttttcctctttgatataattacatgtttctcaaaccagtaatatatcattccagcagaaatatctataaaagatatttttgttgtagtccaaatagagtttaaagtaagagttaatgagggttcgtgaaatttatatgataaaaaacatcagtatagcgatttcataatgttctattcgagttcaaaccaattattactagagtactatcaaataaaaaacagtatttagtatattagtaagaaatattttttatgactaaagatgagacactggttgtttggagtggtaacatattgcttactgtatgacacagcgttttatttcttggaaagtcgtggtgtttgtatttaatacagtcatgacttaacttattagtaaattggatctctggtttattaaaaacatattaaagtaatgtatataattatatagtatgatttatacaaattgatctttcttcttttgattcttttctttaaatttttttttcttaaaatttttttttcttaaaatttttcttcttgaaaaatatttttctcttttaattattattattaacgacataataaaacagtctttaataaagaaacttaataaacatactgtctatgttctaacatatactatatacaaacaaaaaagaacgacatatatgaattataaatctaatgagttcactgattaaagacataggtgttctgtaaaaataagttgatttcttctttttagtcctattttttattatgaacaggttcaataccattacattcaataatggtaatcacaattgttctggaatagttctagaaaataaattatggtttttgtaactttgcaaactactgaacttaaaaccattgaagtgtcaccttaagcagtttcagttttttttacaaaaaattgtagatttcctgtatgttagatatgacacaaaaatttctgaatccttaaagattcttaatgaagttggagtacccacaactatattaatctagactactacagttacagacaacaacaaatctttaccagtcaatgttattgttgttgttgttactccgtcttaatctatcatctacaccgtggctatagttaaaatatccactaacaatgaaaaccaaccaacatctagcaacaatatatcatgcattactactgttttgggttaacaaagggcagtgttcaaactactttagtaaccaatagtatccaatttaacaaactagaaacaggaataataacaacaataccggctatattctgtgatgtgtatattatttcttgtaggtctaataacaaccgcaaatgatgctttgcaacagctaggtgttggttagttctcattgttagtgaactttccactaatagtgaatggtgttggtgctagagagagatggagtgacaacaataacaacaatatctactgaaaaagattcattttcgtattagtgtggaagcataaattgatgtaattgtggttaaagtagagatattaccagtggtggtggtatacaaagcggatggaactaaagtaatcagtacaataatttcagtattctgataataaagagctgtcgctattgacaagcttaatagtatagagaataggctaatgttgtaaaagtagtttagctagaacataatgaaagtacagctatttgctaaaaaattttttcaatagtatctaagtcctggttatttgtatgaaaatagatctgatatgatttttaactgtaaataaatttggcatagcctttgaattaattagataaacactttccttaccagtgactttacctatctatgagaaaattattgaagataatacctttgaatttaatccagtagatatgccgtagaatctattggttattgatgacaccattattcgttaataatcctgaggttatgtgtttctgataacagtaattcttgttgaaatctcaataatattttacttggatagatataagatatagactctttctatatctctaggtgtaatattcctatatatctatatccctaatctaagataacctaaaagtatacacttatatactatatatctaaacttatttaatccttggtttcttgtgccttcttctcgttcgttcttcttgttccttatgataagccctaagaaagaagtatctagggattttcgaaggtgactgtagtaataatgaagacaagatattgaaaagagtttgaatggtagaagaagtaaagcaagagcaagaagtggccagagtaattctaagatgaaaaagaaacgtggtaattgttgatgtcgggagtaaattaccagtattttatttttaacagtatgaggaattgaggtaacaccccttaattttcactaataagatatatttatagtgccaataacattctataaatagttgataacctatgatattgtcaatgtcttattggcttgtaataaaaatattaaagtgtttgatactgaaacttgacatcaccagacatattgatataacaatagttccatgataaaatttttttcatcacctaaattcaatacaaaaaatccgattgtctttaaactctaattcagttgttccaatatacaattgtgccgtgctaattggttgtaagtgcatgttaatagtaaaaaatagtacgatattattatacctcaattgaaagatgcttttgtattcaataatcatatgaaccggttgtagggaacgatcaaaatctctactcaaaaagaacaatacatatgacatcaaataaaccgtgcataacttttgtctacctctggatgatgtcgttcacggaaaattgaaaaattttttaaaagaaaaacaaaaaaaattctctgaaaaaatcatcatctacttttttaaaaacgacttttttactgtaaattttcagatcataataaaaggggttcctttgtttttccaaatttgttgggggaatgtactagaaaggaaatctgaaacagacaaataagcaaaaaaaagaaagccaaaaacaaaagacttaaaatttcttgtagtaaatttctcgtttcatcttcgaaaatttttcttgaaagacatattttttatgtatgttcaagaatttttgaggattgcaattttaaaatagtaatcttgcttttattattttattaaaaatacatacgctgtaggaaaataattttagatattatgtccattatctgcttcctattgttgactagcataacatatagttcaaaaaaataatgagattgtttctttgccgtatcttttgattagatttaacttattttaagaacatttaaacgaggaaattttaaaaaaattcttgataggtcaaaaaaaactcattattcaatcgcggatcttatgtttttctaaaaataacattactcaatctaacattccaaaagtaatgtattcctctgaagttatttgccgatattatgtatatgcaacaagtaagagagatacaccaatttttttgggcaacaattactggtactattttctttcattgtttccgtcatttttattcttttattatttgtcgttttattttattctattataccattatttgttacgctgctctttggcaagtttttggaaaactatagaagataaaagcactttttggaaactctattttttccttgccccttttcctttcgtttcttttttttgcatgtcttaacaggaaaaacttttcattctcttgctgtatttaccgaaaatactgttttatttctattgtttccagagcagaaaaaaaattccaaaatagcccaactttgaaagtgttttttacagctctggaggaactgctaaacaaatcttatccaaatcgggatattcttgtgcgacaataggacatgcattgcgtagttgtccttttttccattagttttttagcaaagagatgacgtacattctcttatctcattataaagtattattaccaataaacattttcaatgaccaagaatcttaaaaatcaagtgcttttccctgaatttgtttattatactaagctcttttgtttttttctttttatctcaacaagggcatgtctccttgatctcgagaatgttaattgttatgaaccgttatcatattttttgtaagaaaatttgtcttttttattgttatgactaagaaaacaatacttttaattcaatctacaatttttttgttacaaatattgtgatatgtttttttatcaatgtcttgatatttttggtaagatcgttcatatttctaaagatataaaaataagtgctatatggtttaactatctttttttgtaaattattccctttcctccctcttgctatgaataaaacactacagctccaagagcattaaacacaggtaaaattaaaagtttgatcaagtaataagtctcttaaagtatctttgctcaacccagggaaaaagtacacaaatctttttctcacaaccaagacattcattcaaaatgcacagtgatatacgttcaatcactagaaagtttctctccattctattgctttttacggtttttcatgtttcgttcgctggtaatatcaccccggatgcatgtgttcttccaaaaaacgttcggccgggtgctactatccgattctacgaatatccagaaggtgatattgtagactacaatagtgcagattttgccaacggtggttatctgcattgtacttttggttgtccttatgtcggtgaaataacaggtgtcgaagatcttaactgggattccggttggcctgcaactgtgcccccatacggttatacgggagttcctgcctcaaactttctgatggtggccactggttacttcgttgccccaatgagtggtgtgtactacatggcgctagaggtggctgattatgccgcttttttccttggtgctggttcggcctttgattgctgtaaccaaacaggctccttcacctctggcgatcctatgttcgtgcttactgtggctaatggtggtgtgttaggcggggctaatcacaaggtgtatctggagcgcgggcatgcctatccatttaaggccatctatgttaacgcgcaaggcagaggtgccattagaatggctatccatctacctggtggtatggttgtcactagtttagctggcgctgtgttctcgcaggtagatgatgatgctgatgagggggagctttgttccccagtttccattagtcatcctttcacaaccattttgaatactgcgtataccctgtctgttcaatcttatcttcgagacttgcccacagaaagcgctgttaccaccatcactacgacagattggttgaataacgacgacgcacaggtaagcattattacagttgttaatcagccaatgcaaacaacatatcatacatatatggggatttccatggggtacctacacgaacgtggacagcatgtcgtgtctcagagcaacggtattacatctgtagccataggtatgaacgtatttaggccgtggccagagactttctacaccactactactggagatgtcacggctccaactacaaccacttcttatagtacagtctacgactacgacaatgagtatactattacttggcagactaatatggctatagtaaaagtgattgagccaccaccatccaccacctacactactactacaagtgaagttgttttcctaacaactactacttacaccactactaccactgacagcaatggctcttcctctccagaggttgttgttgtcgtgatcaccccatctccagccactgcctacactactagtacaggtccagtttctgctccaaccacaaccacctacaccaccacagttgttggcgagttcggtggatcttctccagaggttgttgtggtagtgatcacaccttctccatccacctcctacactaccactactgcagatgtcacagttccaaccacaaccacgtatactacagtaattgaccacgatggttcgtcttctccggaggttgttgttgaagtgatcaccccatcgccatctaccacctacactactactactgcaaatgtcacagttccaagtacaaccacctacaccactactatcactgacagcaacggctcttcaactccagaggttgttgtggaagtgatcaccccatcgctatctacctcctacactactactactgcggatatttctaccccaactacaactacttacaccactactatcacagacagtaacggctcttcatctccagaagttgttgttgttgtgattactccatctccatctaccacctacactactactactactgatatttctgctccaaccacaaccacctacacaaccactgtcactgatagcaatggctcttcatctccagaggttgttgttgttgtgatcactccatctccatctaccacctacactactactactgctgatattacagctctaaccacaaccacctacaccaccacacttgttgacggcgacggttcatcttctccagaggttgttgtggtagtgatcaccccatccccatccacaacctacactactactgctgcaagcatttctgccccaaccacaaccacctataccactacagtggttgacagcaacggttcctcctctccagaagttgttgttgtagtagtcaccccaataccaagtgcgatcacgtcctatgttgcaggcatgattgattcaaccgttgctctattcactctcacttcctacaccaccaactccaagggtagcagcactccaattgacatagtgattgttgaaactccaatgccaactgctatgatctcacatgctccaacgatgattggatctgcctctgatgactccaccaccaaccccaggggcagcagcactccaatggacgatgtaagcgttaagaccccaatggcaagtgtaattacatcattcgttgcaggtatgattgattcgactgatgttctcttcaccctcacatcttacactacgaactccaagggtagcagcacccacattgacattgtgattgtagaaacaccaatgccaaccgctctgatctcgcatgctccaagcatgatcacctcctatgttccaggcatggttggttctgcttctgtgctatccacctccaccctgtacaccaccaactacaacggcagcagcacccacattggtgttgtgattgttgagaccccaatgccatctgtgatcacctcctatgttccaggcatggttggctctgcttctgtgctatccacctccaccctgtacaccaccaactacaacggcagcagcacccacattggtgttgtgattgttgaaaccccaatgccatctgtgatcacctcctatgttccaggcatggttggttctgcttctgtgctatccacctccaccctgtacaccaccaactacaacggcagcagcactcacattggtgttgtgattgttgaaaccccaatgccaagtgtcattacttcctatgttccaggcatggttggctctgcttctgtgctatccacctccaccctgtacaccaccaactacaacggcagcagcactcatattggtgttgtgattgttgaaaccccaatgccaagtgtcattacttcctatgttccaggcatggttggctctgcttctgttctatccacctccaccctgtacaccaccaactacaacggcagcagcactcatattggtgttgtgattgttgaaaccccaatgccaagtgtcattacttcctatgttccaggcatggttggctctgcttctgttctatccacctccaccctgtacaccaccaactacaacggcagcagcactcatattggtgttgtgattgttgagaccccaatgccaagtgtcattacttcctatgttccaggcatggttggttctgcttctgttctatccacctccaccttgtacaccaccaactacaacggcagcagcactcatattggtgttgtgattgttgaaaccccaatgccaagtacattcaccagcactatgtatactaccaattccatgggcagcagtactccagttattgtcgtgattgttcaaaccccaaagccaagtcagatcacttcctatgttgcagctacggatctttcatccactgtcaccttcacctccacctcctacactaccaactctgacggcagcagcactccagtagacattgtgattgtcgaaaccccaatgccaagcgctatcacttcttatgttgcagccaccggtctttcatccactgtcaccttcacctccacctcctacactaccaactctgacggcagcagcactccagtagacattgtgattgtcgaaaccccaatgccaagcgctatcacgaaatatgttccaggcatggttggttcagcttctatcatgtttacctccacctcctacactaccaactctgaaggcagcagcactccagttgacattgtgattgtcgaaaccccaaggccaagtcagatcacttcttttgttgcagccaccggtctttcatccactgtcaccttcacctccacctcctacactaccaactctgacggcagcagcactccagtagacattgtgattgtcgaaaccccaatgccaagcgctatcacttcttatgttgcagccaccggtctttcatccactgtcaccttcacctccacctcctacactaccaactctgacggcagcagcactccagtagacattgtgattgtcgaaaccccaatgccaagcgctatcacgaaatatgttccaggcatggttggttcagcttctattatgtttacctccacctcctacactaccaactctaacggcagcagcactccagttgacattgtgattgtcgaaaccccaaggccaagtcagatcacttcttttgttgcagccaccggtctttcatccactgtcaccttcacctccacctcctacactaccaactctgacggcagcagcactccagttgacattgtgattgtcgaaaccccaatgccaagcgctatcacttcttatgttgcagccaccggtctttcatccactgtcaccttcacctccacctcctacactaccaactctgacggcagcagcactccagttgacattgtgattgtcgaaaccccaatgccaagcgctatcacgaaatatgttccaggcatggttggttcagcttctatcatgtttacctccacctcctacactaccaactctaaaggcagcagcactccagttgacattgtgattgtcgaaaccccaaggccaagtcagatcacttcttttgttgcagccaccggtctttcatccactgtcaccttcacctccacctcctacactaccaactctgacggcagcagcactccagtagacattgtgattgtcgaaaccccaatgccaagcgctatcacttcttatgttgcagccaccggtctttcatccactgtcaccttcacctccacctcctacactaccaactctgacggcagcagcactccagttgacattgtgattgtcgaaaccccaatgccaagcgctatcacttcttatgttgcagccaccggtctttcatccactgtcaccttcacctccacctcctacactaccaactctgacggcagcagcactccagtagacattgtgattgtcgaaaccccaatgccaagcgctatcacttcttatgttgcagccaccggtctttcatccactgtcaccttcacctccacctcctacactaccaactctgatggcagcagcactccagttgacattgtgattgttgagactccaaggccaagtcagatcacttcttttgttgcggccactggtcgctcaacctctatcatcaccacctccatcttctacactaccaattctgacggcagcagcactccaatcggtgttgtaattgttggtaccccaacagtcactagtacaagtttgggatatcactattggaattcttcagtagtttccacaaaattgtcaaggtcatacagttcaatttcgaaatattcaaaggaaagcattagaaggacaacaaatgctgaagcatctaatgccaataattggaacactaggacaattgaatcatcattctcttcagcagtttctgacaggtcaaggtcctctaacgagaacactgcaactacaggaaacatagaaacttctggtgttaacagttggagtactatgaagagtgaatcatcgtccagaagaaacggggttgaaagtaaaacaggttcttcaactgaggcaatcacatatactccaaaggttactgcaactcaagagcaactacacgtatcttctcaaagtgcaagtccaagcagtagattaagtatagtaacattatcacgttatgaaacttcaggttcatctacttcaagtatcatgaatagtcaacaaattactgttgcaccagagcaactacacgtatcttctcaaaccacagagtcgagtggcagatcgagtacagtaacattatcacgttatgaaacttcaggttcatctacttcaagtatcatgaatagtcaacaaattactgttgcaccagagcaactacacgtatcttctcaaagtgcaagtccaagtagtagattaagtgccaaaaccttgtcacaatataaagcttctgctcctacatttagtgttaacagttggaatactatgaagagtgaatcatcgtccagaagaaacggggttgaagatcaagcaggttcttcaactgaggcaatcatgaatactccaaaggttactgcaactcaagagccattacaggtatcttctcaaagggcaaatccaagtggcagatcaaatacagtaacattatcacgttatgaaacttcaggttcatctacttcaagtatcatgaatagtcaacaaattactgttgcaccagagcaactacacgtatcttctcaaagtgcaagtccaagtagcagattaagtgccataaccttgtcacaatacgaagcttctgctcctgatactgctggtacacggtcaaattttatcttagtgcttttctccttatttctattcatggtttagttaatttttaaacaatatacatatgtattatatataatagtatttgtctataccccaatatctactcttgtaatacatattttatattaatttatcggtgcgttttttattatttcaaaagtaacaaaggaaggctgttcttttttctcggtataaataatattagtgtatatgttttagcaccggtttgtaagaaattatctcaagtaatatatattacaatatgaatattaaccatatatgaacacttactgctgaaattgaactttctagaattaataatagaccaattagattttagtaaacattaattgataggaaaaagtggagaacgtactgtttgcttgtcagcagacgtaaacaaacctgatcataaatttggtgccgtacatagacgagatagaggagatatgaaaatatataaagccagcttttttcatatcatgtttctccccttgttcaccttttataaataaacaaaccgaagaactttattataattttgtatactatatctatctaatataatattgagaatgtttactatatatccaatgactacgggcgctcatgctcatcaataatacatcatataattatgtgcattattttcataggtttttaataaaccagagatccaatttactaataagttaagtcatgactgtattaaatacaaacaccactactttccaagattatcatctttttttattttattgttacaaggttatgttaatatttgaataatcaagtagatcattttaatataataaattttagtaacgaaaaacaattttgttaaagctataaaattaatatttctagtagtgagagttttataatggaatatctgattatagataaattataggaattgatgtgaaatcaattttggtgtattggataggttaaaatatattagttacattcttattctattacttatattcatattgttaatattacagttttgatcaaagatagcacatattttaggaattgtaataaaacagtctcagtctaatagttggtttatattcgttagattatttattttccagatcgtttgttctaggtaggtgatgatttgt

SEQ ID NO: 17 - DNA, 295270 bp, Kazachstania heterogenica
  source 1..295270: mol_type = genomic DNA
aaaataaacaaaaaaaaaaggaaaactacaaaagcaaaaataaaacggaaacgagagaagggaaatgacgcgtatctaatttggaaaaataaacaaacatcggatacgaaaaaaaacaattcagatacatttttgatgtaaacaaataagtaagctttattgacgttacctcgagaaaaataataatattatatggttaatggtgtccaggatccacaaatactaacaaaactattaataagtttattattgatatccacattacgttttcgaatgtttgtttatatcataataatacgtaccccctcttcctctatacttttttttttttgaaaatatttacgcaacttattgaaactttgtttgtcattcagtttttttcatttacagaactgtttatataatactgagaatcaatctttgaaatttggtttactagaacatatatataggagtcaaatcttaaacaagttttttccctcaccttcttcttcactctttttttcctttgttacttcaaatcaatgtttaatcctttctttgctacgtgatcactaacaacccaactgtacagagttcccaaatattccaactacatactttcgctaaattattctttctcctatagatccaaacaaactcgtatatacacatatatattagtgaaaaatgcaattcaaaaatctttctttagctacccttgccatcgctactgctgtttctgctgaaggttacaccccaggtaacgtctggtccactttgactccatcaggtacttatgaatgtggtatcgttcacgctactaccactttcggtattgctgttcaaactattgcctctaccaacaagagagatattgtctcccaaattggtgatggtcaaattcaagctcctgttttatctacaaccgctgcttcttcttcttcttcttctgacgttaccactaccatcactaaggccattaccactacattaaaaccatcttcttctaaatcctcttccacttcttcctctaagacatcttcagtctgtaatgcctctgccaccattgctccaaagcaaactgcctgcaagaataaaggtactctacaattaactttgaaggatggtatattgactgacagcaagggcagaatcggttctattgttgccaatagacaattccaattcgatggtccaccaccacaagctggtgccatctacgctgctggttggtctatcacaccagaaggtaacttagctttaggtgacaaagatgttttctaccaatgtttatccggtgatttctacaacttatacgatgaacatattgccgaacaatgctccccaatccacttagaagttgttgaattagttgactgttaaagtcaatcgcaaaattaagaatattttctgttaaaagatattattttctttatttttaatttcatttttcttatttaataacctaactaactattcttttcttttaattatgcaaaaccagataaacactacctctttactgttgttagtttgtactattcccttgtatgcgttcgtaaatagatagactcttccctcatcgcatatatacacgtatacatgtatgtaacttagtgatacccttcaaaacaaacttctatcttatttatagtgattgatatatatatatgtatgtatatataaacataacatacatcactatacaaagtctttaaaaaaataattggaataaataaaaaaagaataaataaaagaaaagccattttcaatttttcgaacaaaaatagcatgcaagaactgaaattaaaatgattatcacgatcacttttatcgcgaaataatcactcttccatgtaagaaaaaactggaactataaacaacataatgcaaaaggaacggatgcaataaaggggctaaaagcgaaacaaaaaaagacccatgcagaatatatcatagagagtggttttggaatatctaatcaattatgaaaaaaagttaaagtcacccaaagatgcttccttaacaggatactaaatcaacagcttgtaagtaaactggagaacattgttcggcaatatgttcgtcgtataagttgtagaagtctccagatagacattggtagaagacatcattgttacctaaagctaagttaccttctggtgtgatagaccaaccagcagcgtagatggcaccagcttgtggtggtggaccatcgaattggaattgtctgttggcaacaatagaaccgattctacctctgctatcggttagtataccatcctttaaggtcatagataatgtaccatcgaccttacaggaaacggctgtgacaggatcagtagatttgccactagtgacttgaccgtcaccgatttgagcagcagcagacttagtagcagcttgaacttgaccgtcaccaatttgggaagcagcagccttggtggttttggcagcttggatttgaccatcaccaatttgggaaacagcagccttagtagtcttagcagcttgaatttgaccgtcacctatttgagaaacggcagccatagtagtcttagcagcttggatttgaccatcgcctatttgagaaacagcagccatagtagtcttagcagcttggatttgaccatcgcctatttgagaaacagcagccatagtagtcttagcagcttggatttgaccatcgcctatttgagaaacggcagccatagtagtcttagcagcttggatttgaccatcgcctatttgagaaacaacagccttagtagtcttagcagcttggatttgaccgtcaccaatttgggagacagcagccttagtagtcttagcagcttggatttggccatcaccaatttgggaaactacatctctcttagcaactgaagatgtggccttggctgcagaagtggagatcctaacgacggcaataccgaaggtagaggtgtagtcagtcaaaccgccactgtaagtgccagatggggttaaagtggaccatggttcagttgggacgtaagcagccatggcagaagtagccaaggcagcagtagctaaagtttttttgtattgcattattaatattttaaatgaaattaatatgtattaatctaaacagtgttgtttccttaaaaaaaggtatgaatttgaataattgattttcttttttttttttcgaatagtatcgatttttcctatattactttttactgggtaaattgcatccaatacgacaagtaaaaggttaacggaacgacaaactagacgaaagaacactttctaaccaattttgccagtttatatattaacaaaaaaagttgaagaaaggaaaaagaaagctttttgcttatacatacatactatatgtaatatgaacttacgaatcatctacttctaattataacagtttactatttaaggtaacatctctcataattaacgtctataacaggtatgaaagtgcaatctgtagaacatttccagcctaggcaaaacgaactcctggaaagactctgttcagcggtatgacgacatctgtattctcccctcgagggggaagaaaaacacaatagcacaaagtgatatatctcctcatctggaaatatttgtccaacccacaggcccatattatttccttattcggtaatttttggctgtcttaaagatcccgaaaaggggaaaaaaatatttcaagagctaaatttagaagtcgtttttttttttcataagcaagacacaaaaaaaaaacgaaaaaaaaaatgaaaaaaaaaacattgaaaagaaggaaaaggagaaaatatttatttctattaacaattataaggggaataaaccaagcatgatcactttaccataaaaggcaaaaggtaaaaaaataaaaagtgttaaaaaaagatcagactgatctaaaataaaagacagccaaaacgatcaaattaagagaagttatatgtctttggttctcaaactccattataccgcaatcctacaacaatgaacagttaaagtcaagaaaagctgtctaaatattataggcaagtaaccatgacatttggctttgctatttacactacatagagatttttcttttgtaacacttccttataatcgacactgtgtctgtaatagttagcagtggaatatattcctcaaaaaaaaaaaaactgatattaaaagtaagaacttcttagtgattgggccctgacattcctctttcctgttatcttgacacctggcttgtcttccatattacaggtgacacttctaaaaggatatatgtagctctaaaatagcaacaaaaatacgattctgtaaaaattttaatccaagaacaacactttatgtgttactaatgtctatgatttgatgtaattagtgttgctttggtggaaaattgcctcgcaacattcgctctcttactcccttattatttccgagaaagaaaacaaaaaaactctccatatttttccaaatgcggtaatatttgcagaaaaccaacgatgagattttgccaaatcaggttaaaatctaaggtaggctgaattgcctaatatctttacctaaacaggaaaaaacaaaaaaaagaaaaaaagaaaaaaagaaaaaaagaaaagtgcaagatcaaagtgaaaacttttttcttttgtttaatattgtatctccttcaatttaataaaaaacatgtataatgaaaggtgcatatatttgatattacaatgtaattgaccacaccaccagcaactactctattatggttttccattttaatacatttactatctaaaagaagaaaattaaaaatgttgtcatctattttttttagtaatgaattagactacaattatctcatgtatcctctattgtgtgtgatgattcaatggtatatgtcattcacaaacatatataaagatagtatgttctagcagaagacacagcaatctttttgctttttcttccctatactacaactcttccaacaaaaaccagagaaaactaaacagagattttcttttaaactatatcaacacaagcatacagaaacagaaatgcaatacaaaaaaactttagctaccgctgccttggctacttctgccatggctgcttacgttccaactgaaccatggtccactttaaccccatctggcacttacagtggcggtttgactgactacgcttccaccttcggtattgccgtcgttggaatctccactcctgcagctaaggccacatcttcagttgctaagagagatgtagtttcccaaattggtgacggtcaaatccaagctgctactgccaccaaggctgctgtttcccaaattggtgacggtcaaatccaagctgctaagactactaaggctgctgtctctcaaataggtgacggtcaaattcaagctgctaagactactaaggctgctgtttcccaaattggtgatggtcaaatccaagctgccaaaaccaccaaggctgctgtctctcaaataggtgacggtcaaattcaagctgctaagactactaaggctgctgtttcccaaattggtgatggtcaaatccaagctgccaaaaccaccaaggctgctgcttcccaaattggtgacggtcaagttcaagctgctactaagtctgctgctgctcaagtcggtgacggtcaagtcactagtggcaaatctaccgatcctgtcacagccgtttcctgtaaggtcgatggtacattatctatgaccttaaaggatggtatactaaccgatagcagaggtagaatcggttctattgttgccaacagacaattccaattcgatggtccaccaccacaagctggtgccatctacgctgctggttggtctatcacaccagaaggtaacttagctttaggtaacaatgatgtcttctaccaatgtctatctggagacttctacaacttatacgacgaatcaattggtgctcaatgtcatccagtttacttacaagctattgacttggtatcctgttaattgcattctttccaaaaagaaaataagcattaatctaaacttattataattttcattttgcattatatattactagttcgttcatgttgctattttattattttttcttcgaaatttcccaatgttgcaaacattgtttttagttcttaaagttttgaatgttttaaattcagatgctttcatgttttatgttttttatttaattcttatatattatttgtacacttagtcatgatacatccaataaataatgttctaaaatcataaaatatatttcagtctggaaacctgacctattatttcaactggagagtggaagctacttgcatctctagatcattagtgtttacacctttagcttacatgttcatttttcttacattagaattttgcgttttatatgacgaaaaaattactccagaaaaattttgaactgtcaaggttataaaaacataaatatataatttatatgtgtaataagaaaacttgttattggtaaacatgatacattcctttcctagaaatcaccaaaaaagtgcaaatacgatagaattaaccaaatcagtatggtatggaacagaaatagaacttcccttttaataattggggtcctttttcatctcttttatctatggtcaatatttgatatatactttgtatcacccttggttcacggaatgtcccaataccgtagtacaaacaatccacctgctaaaagattgtttttaattgtaggtgatggattgagggcagacaccacttttgataaaatcacacatccagtatcaggtgaaacgaactttctggcaccttttattagatctattgtcgaaaataatggaacttatggaatatcacatacaagaatgcccacagagtcacgtccaggccacgttgctatgattgcagggttttatgaagatgttagtgcggttacgaaaggttggaaggaaaaccctgtcgattttgatagtttttttaatcagtctacccatacatactcttttggatcccctgatattttaccaatgtttaaagatggagcttctgatccaaatcgtatagatacctggatgtatggtcatgaatttgaagattttactcaatcttcaatagaattagatgcctatgtttttaaacatttgtattctttattcaataatgctactataaatagtacacttaatactgaaataagacaacaagggaatgtctttttcttacacctattaggttgcgatactgctggccattcttatagaccatattctgcggaatattatgacaacgtgaagtatattgacactgaaatttcaaaattagttgaaaaagttaaagatttttttggtgatgaagatactgcgtatatttttacggctgatcatggtatgagtgcctttggttctcatggcgatggccatcctaataatactagaactccacttgtagcatggggtgctggtttaaataaacccaagaggaataatgttccggttttcgataattatactaaatcatgggagttaggtcatattgtaagaaatgatgttaaacaagctgatattgcatcattgatggcttatctaattggtgtgaactatcctgccaactctgttggggaactgccactatcttacattgatggagatgaagataacaaattaaaagcattatacaacaatactaaagctattctagaacaatacgttgtgaaaagagaagaagttaagaattctcagtttgtatttaaagattatcataaatttgttgaaaaaccttttgaagatcatttagatgaaattcattctattatcgatcgaattgctaaaggagaaattgatttagaagaacaagctatttctatgattgaaaatcttatgacaaccacactggaggcactacattacttaaccacatacaactggagattaattagaacaattgtcacattaggatttattggatgggttgttttctcattcagtatattcttaaagttatttattattcctagtcatcaaaacattaaaggaagaatcacactattaaatttaacctttttcattttggttagtttatgcttaaactgggtcttatactaccaacgttctccattcaatttctacatgtacttactattcccactatatctatggtgtcaaattgttgctaatcgatatgtgttacaaataggtatcaaagaattattccgtggaatttctgtattagaaagaattacaattgctttcttaatagtaatgatctatgaagggattgtatatggatttttccatcgatggatttttagtataatatttattttatttgcaatatatccaacagtatgtggattgcaaactaatttgctaaaaaccttagcctggtgttttacatgtatttttatgtctactttcacattatatgatgcagttaaaatagaagatctgacccaaattaattatgctggctatttaattattattagttcattttatggattgaaaaaagttaacaaaagcatttcatctaatacaagaacaatacttttagttcaaatgctattagcaatcttaatgttaattgtgactaataaatcagttgtatctttacaaaaaagagaaggtttaccatacagtgcccaaatctcaggttggtctttattaataatttctttatttataacaccatttttccattatttaacacctagtaataactatagagtcagattattaatcatttatctaacatttgcacctacatttattatattgacaatatcatttgaattattgttttatgtgtttttcacagcctttgttgttcaatggattgaaattgaatcaagcttaaaacaacaaagtgtaaaagacaactggttgcaattgctaagagtttcagtaattggatttttcttattacaagtagcattctttggttgtggtaatgttgcatcaatatcatctttttccttagattcagtttacaggttattaccaatatttgacccattccccatgggtgcattattaatgttaaaattaattattccatatattatattatcatgtggattaggtatacttaatatgaaattaactataaaggattacacaatatctacattaattatatcaacaagtgatatattgtcattaaatttcttctatttattgaagacggagggatcatggttagacattggtatcaccatatctaactattgtttagctatattgtcatctttgttcatgttagtattagaaatggttagtcatattttactaagaaatgtgacaatagaagcgactccactggaggatatcgaaaagaaggaaaaataacgataaaaataaatataatagatagtatatatatttttattaaatcataaactaatcacaattataactaaattattatatatcttacctaatggtaagattctatttgatcagaatatgtaaacatttattagatgtgagtcaagtttgtagagcgagaattaaagtttggtgagtctttatttttttataaaaaaaaaaacataagtaagaatcaaaaaataatatgtatacatatatataaacaatatgttaaatcctagaaaaaccaagatcacataaaaaaaagagactttcttttaggttccagaaaattgcagtaatttattatatttaatccttttttttttcctaagaaatattgttcagtgtacataactgctgaaacaaatagaaaaatatttatctggcgattatttttttagatctgttttataaaattttgcaagtatttataatatttgaaaaaaaaaaaaaataaaaaaaataaaaaaacttaatatagtttctttatctttgtcaactaatatttcgtggatgtcataaatattagtcataatagatgacaaaaatggtgatattatttcagttttggtatataattatggtggtgtagctgaatagctttatggctcaaaatatttttgtgcatatacgcaataggaaagctatttgctaagataaattccattttatattcatatgttgattataaaaaaaagtgctaaagacttaaaatcttccacttttacaattcaaatttcttagaactcccagaagcacatatgtcactgaaggttgctgattgattcttctcctctctttgtaattatatggttttgttgaaatagaatgttctataataaaatagatagaacaataagattttagcagacactaaacgataaattgttgagtaataattgttgagaggtcaccaaaagttgttgagtttttttattaaatatcttactgttcgtagaggaaaatggcttaatgttaacatatataaagccaaagatttcatcatacattatttttatcttatttacaatctttctatattattatttctatgttgtatatagagaaagaaagtgaagaactttattataattttgtatactaaatctgtttaatataatattgagaatgtttactatatatccaatgaataaaggcgctcattctcaacaggtttgtctttcaatttgaaccaatgttgacacatttattctgcaaatgttccttataaataacaataaaacaaagaatcttgcagacaaacacaatggaaattgaagggaaaacaaccgaaaacaaaaaaaagaaactcaattaactgcttttatcattcaatacgatattttgggttgtttctgtttttttttttttttttttttttttttaattttttcctttccctccagttctgtcaatcgtctctttattatagccgttatagattgagaaagaggctttcttgttataaaggcagcctgcttttagacaggggaaaaataagaaataataaaacaaacaaaacaaggaaatagggacatctagaaggatgatgtaagatttagactagattggggttagcataaaccatcttaaaactatgtattcaaatatgaacacacatacattcatgcatatatatattcattttcttacgacatttatacgatattatatagaaataaaaggtttcaaaataacaaataaataaaaaaaggtttataatagtgttgtatccaacaatttagattttctataattgtagtgcaggcaatttcagatatagatacaaaaaacatcatagtaatttgatattatcctaatttatctatctatccatctatctttatattctgttagttaagtttcaatataaaaaaaatcaaatatcttgtataatcatttaagtaagtaaatttacagatatatatttttgacatgacctatataacgaaggataatacttcactaagtcaaaacttaattaataactcgtttcaaaaaatattgaaaatattagagtagaagaaacactagaagaagaagacgaagaagtcgttacattacagcgattaactgaagaaataaagcatcatcataaagataaatgtatttttagaagaccgagcttatttatattatccatattagtatttttatttggatttagtgaaatgttatatttaacaccgtttatcacattaacaataaacaagatttgccgtggtattcatgcaaatttatgtgattcaaaagaagttcaaatgtacatgtctcaaattggatcaactactttaatatattcaggtataatcagtaccttaatgagtggaaaatggggtcggtggtccgatcactatggtagagttaaaatattcggctatatggggttaataagagtaataggtaatctattacatttgctggctttatcttcatatgtaccattcaataaatggttaattattctttctgccactgtaaattcaattagcgggggtatgtttgcattttttggtaatgcaaatagttatataaatgatattgtggaacctgaggatagaatattttcaatcagttttgtcaccagtcttatgcagataactacagggattggaccattaacaggatctcttttagttaaatggtataatggaaatgattcggtacccatctatgttgctattgcagccggtattctattcatagttttatgttttactataataatagaaccacgtcataatctatggttagaatacaccagagaacaatttactatcaaacaaatggagttatatcaagaatttaacaatgacattaccaactcttcttctactttatggttcaaagctcaaagatatggtaaatatcatctaataaaattagtagatttcttggaacccttcaaacaattttggttaaaggataaaccttcctcagtgaaatggaatgttttattgttagttactattgatattctttttggatcagttatgatgggaataatgcctagttttttattattttgtacatacaaatatcattggaaaagtgtggaattaggctacttcatatccttctgtggcatagcaaatggcataacattatttttatcgtcacattatggtatgaacttaatgaaaaatgtaattaaaacaaatccaaataatgtggataaactagataaagtttctattggcatgtctttgatatttttaactgttagcaacttttttatgataagattctccaactattcaaaaatcatcataatctttgtcattttaagaagtctatcaaagatatgcagtccaattgctgaagcagcaattatgaaacattataagaaaacaggaaagagtacaggtcaagtgtttggtgccattgcattgctgaattctttatccatgttaattgtgccaccaatactactaagaatatacggatttactattagtataggaccagaattgtttttgtatttccctttaacctgttgcctaattgcacttataaattgctattttttaagtgtcaatgctccaattgagagctcaaatcttatgagatcctcaactccactttatggaacggaaggttaattaattaattcattcactcattaattcattcactattagcatcgcttttgtttctatcttttgtccatgtgttcctcttctcctttatttttttactttttatttatttatttatttaatgcatccaatacagtaattcaacattatccccaatagaatcgacgttatcaggcaagttgaaaagaaaaaaggaaaaaaaaagataaaacaaaaaaaaaacaaacctagccttcttctattttctgtatttccaattagcataaacaagtaatagatgatgttgataaaatgaaaatagacaagaaaattcacatcacagaataataataatcaaataaaaaaaagaaactaaactttgtttaaatttgttgccttttcttttcatttcttttttttaattttttttccttcaatttgctttcgtttctttttctttatattaaaaaattcagaagtaagaaaagtccaaggcttttaaggctagtatctcatactgttgcaataaacgcttatagactagacgaatcatagtcaccatacattatatattagtaaggaccgttaaaacattatcgataagataagataaacttaagattgctaaataagttagtgaactttcccaaaaaaattttttttccctcccccttattttcaactacttttgtgtaaaatgtatgtggacccacagaggaataaccaggtacggcggttgactttaaatattacacccaaggaagaattatcttatcatagaccaagacctgcgaatgaaaatgctataatgtctaatagagaacaatctccacaattggatattgccaactctacttctccagtatactcaattcctaaagatgaaatacagattttaaaggagcgtcaagcgaaagaaaaagaagaagaagaggtagtagtagaaaggcaacatgaaaagagtttacaagtggatagccaaaatttatccatcataaaggaattggaaaccggaagcactgctgttactactaccgctgcagcagtagtttctaataataataataatcataaccataatcataatcatcatcataataataataataatataacacagaataccgctggtgatgataaatctttattcaattctgtacaggaacctttaacagttaagggaatagaacatgatatgttattacatggtaaaaagacctctgggaaatatactttccaagattttcaaatattaaggactttaggtactggatcttttggtagggtccatttaattcgatcaaatcataatggtagattttatgcattaaaagttttaaaaaagaaaacaattgtaaaatttaaacaggttgaacacacaaatgatgaaagaaaaattttatcaataatatcacacccctttttaatacgaatgtgggggacattccaagattcgcagcaaatttacatggtaatggattttattgaaggtggagaattattttctctattaagaaaatcaaaaagatttccaaacccagttgccaaattttatgctgcagaaatatgtcttgctttagaatacttacatgatttggaaattatttatagagatttaaagccagaaaatattttacttgataggaatggccatattaaaataacagattttggttttgcaaaatacgttcctgatgtgacatataccttatgtggaacaccagattacattgctccagaagttgtcagtacgaagccttataataaatctgtagattggtggtcatttggtataataatatatgaaatgttagctggttatacccctttttatgattctaacactattaaaatatatgagaaaatattgaatgccccattgaaatttccagaatactttgattccttagtgcaggatttattgagagggttaatcaacagaaatttaagtcaaagattaggcaatttgcaaggtggtactgaagatgttaaaaaccatccatggtttgaagaggttgtttgggataaaatattagcaagatgtattgaaacaccatacgaaccaccaataagacatggacaaggtgattcatctcagtttgatagataccctgaagaggaacttcactatggttttcaaggtgaagatccgtatcatgatttatttaaagcgttttagttttgttgaggtttgcattgaatattttttgatctacttttattttattttattttatttttgttaaaatgcatttggccatacatagcctattttctttgtttttacttctaaaaagaagtatctctatatctattatttatcctttccttcatctgcacgtgcgatatttctctcactttactagtattattattttaatactagatttacatcaactatttaaattttttttgtcaattttgacttttctcctaagataaatctattttgtttctaatttatataacttaacataatttatacagcatattcatagactatattaacgaattaaataatataatgcaacttgtcttgctaaaccattcttttcttcctcttttattccattagaatctgaaaatatatattttttgttcttttttcttttttttttttaattttgtgaactttttatcaaaggttgattcaattcccgattaaacaaggaaaattcaactgaaatgtacaaatgtaaaacgtatatatcaagggagaatgataacaaacacagctttgatttcacatttttgctagctattattcttagttttcattaaatctagtcaaaattttgtctaggtaattgaggtaattccatcaagagaaaaaaaaataaacaatagaaaaagacacttataaaatatggccggaaagtcaagagtcgttaagcaactatcaatattagacaaattaacttttactacaaagaaaccacaaataataataaatcccactaagtaccaatctttaaaattaaccttccaagtacagaatcacaatggacacatgggtgcacgtaaattttggcgtgaatatttacctacattaaaattttacaacccaaactttgatatgaatgtcactagaatcaaaaatgatgataagttagtacaagtaccctgcgtattagagatcttggatgaacaggggaaatctttggaaacaattaatatgaaaaacaaaagatctgaagatatcatggatgagtttttaagtaagattgactatgaagtaataagtgaggataagttaataaaattcagtaaatagtctaagtaaaatacttccttcagaattaatttttgttttggcctttatttttattgccaaaacaaatagcatatgtacaagttttatatatataacacccacatttttctgtaaataaccacattaatttttttcctttttctattttttttattttggttttgttgttcaatattatcttctttaatcaacaatgttcttatacttcatcacctcaaggattagcattttaattattggttttgtttattttatatatatgttataaggcagatatttgatgtattatttgtggtaaaatcaatcatatctcaataggaaaagacttttaatataatagtgcttaccttaaacgttggtattgttctaaaagactacttgagagtaaaaacattgccattagaactactgatttgcctctactagtagaatgtatctaataaaatatatgttaattattacacaatgtagtaactaatgattacaatagcatacttcaatctatgagcttaatatagtgtaattggtgacaaagtttgcgaggtaattattgatgaattggcaaaataaaaacaaaattaagattaatatgtgaaaactcaaaattattataatgacattgttactgagaaagggtaggttaggtggaggttaagttgtaaagaaaattggcataacgttagcaaatagttattatatgtgatgtcaaataatcctaaagatatagattgatagtattattcaggaatgaaactatattagtagtgctttccaacagtagcaacacaatagtagttaaagcatatcatgactatattgaaatggattaaagtatagtaagataatgagataattcgaatgtgtatggatagaaaaaaaatctattgggaagatctatacaaagaccttagacaaatataattagtatgaaaacaataagttatacacatcttgggagataatcttgtacaacagaatcaatgttcaatattatttgtaatcgtgtaaaaacgtcccgatacggagctttcttaaagagaaactatccaactcttgtgaccctttcagttttatgggaacttcgtattacattcttttatatgtcttatatgtagaaaaagtaagctaaacatatggttttaatctgtataactccttaatacaaatttttaatatttttcgagagtaaatgcatcttgcaaaaccattgtcagtatgttatatgttagtaatttcgacgtataacgtaatttttttctttgtttaagatgaagacttatttagatataagaattttgtttggaaataaattagtataattcttaccacacatgagcagttaacagtatagcttagaataatagttcaatattattcttagttgttacagtgttaaaccataactatgggtactgattattaagttgcagctgtgtagaaattacgttaagataactgaaaattgtttgattacaattagcacaggctataccacaggtttggttaacgatgttgtcaatgagtgttaaaacaaatatctatgtttatttcatagacaaattctgaatgttcttattgaaccatacgctaccataggcattatcaattaaatgttagtttaaactgattatagtaaacatgacaatgtagcttaccgtagaagtcttcagtctaactgatttaaagacaaaaaaagtgaactagaatgtttcagaaatcattataacaacaagattagtatagagggattcacatagaatatcattcacactagtgaaaatgtttgatagtagaagatgtaatcagatatatactgaattttaattttgatacaggatttcaatatcaaaaactctattaatattcatcatgttaataatatgctaaaataagataaacctataatcggatgttggtggtaatgtaagttctcagctatttatagcataatattaatgatgttagagatctactttatattccttggtttttttgttctccataactagtaaataagatatagtaagatacagtggtacttattttatttcggagttcttttttacataagcttttataattttccaaccatttagtgcgaagaatttagattatcaatggtgtctccaatcgcattccaacataattgaagaataattttaacctaaatagatactttttcttacttaatcaaaatgtccagactatggtcgtcgtaactacataatccctgcattgtggaatcaataatctgacattatatttttgtggtgtagtcatgttagtcaaaattattactgatttaaagtaaatatatgggtgtttaacttacgagaaaactctgacttgttgagtttttttttcagtttttttggtatataaaaagaataaagaagaaaatggatgattttggatgaaaattacgatgacatcttttatcttcagccatgtcttagaattaattttttcaactttatatcaattatttttattttcttataagtaaatgatggagttagtagttgagaaacgtaaagaaataaggaaatgaggttggttttaaaaaaaactttactatgagtttttatggagtctgcagatagaaaacattttttactcatcgcttgacaaaagtaaaggtaaacatatttttagttgattaaaaatatatgtagattgatcctttgtacttttggttttcttctacagcaatttttatcatttgttgactctcaaactttatattcttatattataatcctttttttttaggcagatcattatttaagagcaataaagattgttatgtaacaacagatcaaactttagtacccatacaataaacctggtcgttgttttctaaaaaaaaaaattaccaccaaattaatatatatataaaaatatatattatacgagtggaaaatagggtataagtaaatattatgatatacgagactgatatatatgtatttacctatatatattgttttatttgaaaaaattatcaaaatatgaatggaagcacagagaaaagtgccaaagcaaagcttgaccatttaaccacgatattaggagcagaagcttcgtattgcaataatgttactgtgctcgatttgccactcgactctgtggtttgggaagatgcgtgtagtggctcttgtgcaacagtaatttgttgactattcataataattgaagtagatgaacctgaagtttcataatgtgataatgttattgtactggatctatcgcttggttttgcagtctgggaatatacctgtaatggctcttgagttacagtaatctttggagtatttatgattgcctcagttgaagaacttgtttgaccttcaaaaccgtttcttttggacgatgattcactcttcatagtaccccaactgttaacatcagaagtttctatatttcttgtagttgcagtgttctcgttaaaagaccttgacctgtcagaaagtgcagaagagaaagatgattcaattttcatagtgttccaaatattagcattagatgcttctacatttcttgtccttgcaatgttctccttcgaaaattttgaaatcccagtatatgctccagagaatttcgtagaaactactgataaattccaatagtaatatcctaggcttgtacgtgcgattgttggagtagctacaacaacaatgtcaactggactgctgctaccattggagtcagtggtgtatgatgtggaggtggattgagcagaagcagaagctactagacctggaataaatgaagtaatagcacttggttttggagtttcaacaacaacaaccccaactgcactactgctgccattggagtcggtaatatatgagatgtatgaagaaagagcagaggctgatccaaccattccagcactgtatgctgtgatagtgctgtgtactggagtagctacaacaacaatgtcaactggactgctgctaccattggagtcagtggtgtatgatgtggaggtggattgagcagaagcagaagctactagacctggaatgaatgaagtaatagcacttggttttggagtttcaacaacaacaaccccaactgcactactgctgccattggagtcggtagtataggaaatatatgtggaaagagcagaggctgatccaaccattccagcactgtatgctgtgatagtgctgtgtactggagtagctacaacaacaatgtcaactggactgctgctaccattggagtcagtggtgtatgatgtggaggtggattgagcagaagcagaagctactagacctggaatgaatgaagtaatagcacttggttttggagtttcaacaacaacaaccccaactgcactactgctgccattggagtcggtaatatatgagatgtatgaagaaagagcagaggctgatccaaccattccagcactgtatgctgtgatagtgctgtgtactggagtagctacaacaacaatgtcaactggactgctgctaccattggagtcagtggtgtatgatgtggaggtggattgagcagaagcagaagctactagacctggaatgaatgaagtaatagcacttggttttggagtttcaacaacaacaaccccaactgcactactgctgccattggagtcggtagtataggaaatatatgtggaaagagcagaagctgatccaaccattccagcactgtatgctgtgatagtgctgtgtactggagtagctacaacaacaatgtcaactggactgctgctaccattggagtcagtggtgtatgatgtggaggtggattgagcagaagcagaagctactagacctggaatgaatgaagtaatagcacttggttttggagtttcaacaacaacaaccccaactgcactactgctgccattggagtcggtagtataggaaatatatgtggaaagagcagaggctgatccaaccattccagcactgtatgctgtgatagtgctgtgtactggagtagctacaacaacaatgtcaactggactgctgctaccattggagtcagtggtgtatgatgtggaggtggattgagcagaagcagaagctactagacctggaatgaatgaagtaatagcacttggttttggagtttcaacaacaacaaccccaactgcactactgctgccattggagtcggtaatatatgagatgtatgaagaaagagcagaggctgatccaaccattccagcactgtatgctgtgatagtgctgtgtactggagtagctacaacaacaatgtcaactggactgctgctaccattggagtcagtggtgtatgatgtggaggtggattgagcagaagcagaagctactagacctggaatgaatgaagtaatagcacttggttttggagtttcaacaacaacaaccccaactgcactactgctgccattggagtcggtaatatatgagatgtatgaagaaagagcagaggctgatccaaccattccagcactgtatgctgtgatagtgctgtgtactggagtagctacaacaacaatgtcaactggactgctgctaccattggagtcagtggtgtatgatgtggaggtggattgagcagaagcagaagctactagacctggaatgaatgaagtaatagcacttggttttggagtttcaacaacaacaaccccaactgcactactgctgccattggagtcggtaatatatgagatgtatgaagaaagagcagaggctgatccaaccattccagcactgtatgctgtgatagtgctgtgtactggagtagctacaacaacaatgtcaactggactgctgctaccattggagtcagtggtgtatgatgtggaggtggattgagcagaagcagaagctactagacctggaatgaatgaagtaatagcacttggttttggagtttcaacaacaacaaccccaactgcactactgctgccattggagtcggtagtataggaaatatatgtggaaagagcagaagctgatccaaccattccagcactgtatgctgtgatagtgctgtgtactggagtagctacaacaacaatgtcaactggactgctgctaccatctgaattagtagtgtatgatgtggaggtggattgagcagaagcagaagctactagacctggaatgaatgaagtaatagcacttggttttggagtttcaacaacaacaaccccaactgcactactgctgccattggagtcggtaatatatgagatgtatgaagaaagagcagaggctgatccaaccattccagcactgtatgctgtgatagtgctgtgtactggagtagctacaacaacaatgtcaactggactgctgctaccattggagtcagtggtgtatgatgtggaggtggattgagcagaagcagaagctactagacctggaatgaatgaagtaatagcacttggttttggagtttcaacaacaacaaccccaactgcactactgctgccattggagtcggtaatatatgagatgtatgaagaaagagcagaggctgatccaaccattccagcactgtatgctgtgatagtgctgtgtactggagtagctacaacaacaatgtcaactggactgctgctaccattggagtcagtggtgtatgatgtggaggtggattgagcagaagcagaagctactagacctggaatgaatgaagtaatagcacttggttttggagtttcaacaacaacaaccccaactgcactactgctgccattggagtcggtagtataggaaatatatgtggaaagagcagaggctgatccaaccattccagcactgtatgctgtgatagtgctgtgtactggagtagctacaacaacaatgtcaactggactgctgctaccattggagtcagtggtgtatgatgtggaggtggattgagcagaagcagaagctactagacctggaatgaatgaagtaatagcacttggttttggagtttcaacaacaacaaccccaactgcactactgctgccattggagtcggtagtataggaaatatatgtggaaagagcagaggctgtactcactgacccttcactgtatgcagtagttgtactatacactggagtagctacaactataatatctattggactgctactactgtttgaattggcagtgtatgaggtgtaagtgaatagagtagaagaggaatctatcaatgctggaatgtatgtggtagtgactattggggctggaactgcctcatagtagacaactataagctcttcattataagaattaaacattgatgtaagtgttgttgttttagtagttgtatcagcacttaaatccgataatgtagttgtgattgttgaggttgttgtcatatatgcaatggatccagtatatgtgaaagatatatccgaaaggctactgaaactttcatcggggaaactgtataaattactacctataccattatccacagtaccatctggcaaatttattgagatttctaatacacctttttgattctggttaatgtataaaatcttaaagggataatagtaaccttcttccatatatattgtctgtgcgtcattatccataccataccttgcactaccaacaactgtgacaagatattttggggatttataatcttcatgttgaccaccacacttaaatgcttcaccagaacctagataaatagtagcagaatcatcgactttagtgtttagggtgtaaatacctgttagtggagctttataataaccggtgatttccatcatgaaattgttcatattaacacctgtgtatccatagggaggattagttagtggccaacctgaatcccatgttagatttaaaacaccagtaactgtgccaacatacttatttcttaaataaccaccttccaaaaaccatgattctctataactccaagtatcatgtatagggtattgaaaatatctaacagtagctccaacagtaccattgtttggaactgagcatgctgctggtgcataggccgcagtagcaagttgtaaatatgtgtgtaaccctaatagtaaggtaataaggttcttataatacaataacataatgtattattaagaatgaaaatatatgattatgcttagtaaaatgtgtgaagacgttgtgaccgttaaacaaaaaaaatcttaatgttggaactaatatatagctatgttataatttatctagtgaattattttttttcatctaatatttgttctttatattttggagaaaagttagttctactgaaaatcttagggcggaagataggattatacccaaaaatcaacagattggatccaacatctttttatatttgagaaaccacacatgaagtttagtccataatatgatataggctgttggaatttttttctccctttgagaaatcacacataaagttgtagtttcataataggatataggctgttaaaattttctccaatttgaggacatttcacttagtaatagaaatgttaaagattttaacaacctagccaagtaaaagttttaatgcaaaaaaacaatgtagaatataatagattcgtctgtattactagggagtatgcaagattgatggtgtcatacgttataaaaataatgatagaatgtatgttttcctcttgaaaaaataggaatttctttttgtccaaaaaaaaaacattacttgcaaaattttaggatttctaaaagtctaaaattttttctttttcttttttttttttttttcttattccattaaacgaattcgattcagattgcattaatttttcgattttcaaataccggagcggaattattctattctagggttgtccgatattccaattctacggaaagaagtttcgaaaagtgacggctatctgaaaaaaacctaggggtaagaattttacagattgaaaagggtcacacatatggcaccgatacaaaagagatcgggtttagggcaatattctgtatgttccctatggtcatagttacttggagttggagtttttataagacactttggaattggtcaatttacatggatttcagaaataactcagacagaataaatataataagataactcaaataacaactctactttaaattctaatttttttttttatgagtttatgagaaattcattttggaaaattatcttatcacttttaaatttaggtttttttcttaaagtctagttgaaagtgggcatttggcgagtgaatgaaaagagagaagcattcagacaatacgtaagtgtgatcggtatatatatatatatatatatatattcatctttaataaaccaataataaagatttatgtatacttgttgaagtccagttaacagttgttttatgattgtctgtctttgtatatttagtgttgtttatgtggatatttctagactacactgttttattcaaaactggtattagtagggttcagtttaaaaaaagttacttatgtgctactttacagtaggggttgcagtaaatttttaaaaacttttccttatggacacatttttgtaacgacacatcaaatagcgttggggtttttattttaaaagccttactctaaaaggaaaaacataaagttttgcccttgcctagtttgtgaaaaactttataatgaaatctaaaaatatgatttatatttactttttcaaatattctttgtcttatttcaaaaatgttaagaaggtcactataatttaggatacaatgtggttaaaatgtgaaaaagtgtcggttgttacatagtgcaagtaaatattttattttcgtttttttttgtttttttgagattccactagatcttttttcagatattaatatttcttgttaagttgttttatttttcaaataaacttattatgggcgtttctatattatacatttaaagttatatacagaagagtttgaagaattttagttttttttaataatattattattcgattatcactgataaccttagtaacgtctcagccttatctttttatgaatttttggcagggacgtatctatcttttggttgaaataccaaagaaatctttaaaaatatcaattataaattagagttataagagaaagaatatgaaagaagaaaatatactaatatagactactactttacttaagagggtatattcaatgatttatatgttaacaagttatactgtattcgattaaagaaagaaaggaaggaaaggaaaaaacttatattaagggatatttggttgaatacctttgtattctaatgatttcccccccccataatcaaactcaataaggtaaacaaatcaagatgtacctatctcatatattttattatgtagaaaaaaaaaaatcaaatattgtatatgtgtatttatatatgttcatttactctaattagtttggttctgttataaaactagataatattctgttttaggtctacttatctttagttggctatagttaattgtttttttagattattaaagtcttaagcaactaacatgaacaattcaattgtcagaacctttagtttgatcactctgtgttgttcatcttaatctgttattttttaagtgttaaagttgttttgtggcagatatgaagaaaactgcgtggaaagttttaaaaaggataattcaacatagatcttattttccgaccaggatacatgcattagctaaagacccaaacgcttatgtctaattagaactagttgatagtcaatacataacggccgctgtctatttttcttcaagaaaatagagttaaaaaagtcgctcaaaggacaagaactttagatttaataatttattaacgccgataaaataactaattaaatgtcttaaaagaaaaaaggatgtaaggcggaattggtgaaatccattatcctaatggtttatttgtgttatttaactcaagtgaataatgatagaatttttggaaaataattaatttggttttttttttgctttaatacatagacctattgttatgagagtgacattatttctctcatagttttacaatatacaaaagtggaaattataaaatatgaggatgttatatttgtccacatgtgctaattttgtaaatatttaaaaaatattttgaaaaggtttattatttaactttttatagctatttatttgaaatgtccattttcaaaacaatcggatttaatatccctcataaatttattccaggggtaatctccgttttttctatggagcggagaaatcttgaaaacaaaatactaaaatacaaaagacttactttatttgttaatctggaaacttgcgcataaataagttttcttatttgatgtaccgaatatattgtgaactccatgtttattgtttttaagaaacaatacccaaacatctgcagttaacaattgccaagattggataaaatacgttttccctcttacaacttatttatgtaatagaagagaggttgttactatgtaccgcggaaattgcaatttttctaaaaaataattgtgtttagtcttttaaattttgagaatttgttaaggacattttatcctaagaacaactaattcttggctttctctcataaaattgatacgagcttctattatcctgaaggaaacttcaatagaaaacaataactagatagtttggtagattttgtagctctatatccaaattcaatgactgaactactaaaagcctccaaccagagttttcctctggttatattgtgaaaacattaccatgggcagattgtgtacttcccctctctttcccaaggggagtttaatctgtttgttttttattccgcgcccaggttttacaggcaactacttgtatagatgctagacttcatgatgtatgtgcaaagacaggggtagacctgatcattagtgccagcattcttagaaaacgccacgtttttttgccccaagaaaaattcagggttaaaaataaaaaaaaaaaagacgctacgaagtatatcctaaaaaggaaactaaaatatattcttatttttttagaaaagattttgatttttaatttgtggtttgtgatgattttgatttaggaaatctaaacagcatattttagccttcaatattgattaagctatgctgtaattaattgctcttaaagaagattgctttgtttatctgttatgaagaattgtgcttggtttacataaccacattaccccaataaaaaaagatatatatatatatatttatatttaataattgagtttatagaatattcgtatgcttaaggcagaataatttttgttttttagacgatctgtatcaaaaagatttagatagctgttaggttagttgttgcttaagaagcatttttacaaaacattggtaagtttttgtgtattgtttcttgtaaaaattcggtaagtctttactaacagaggtcgattaaactttatatacaggttcaccctttttatattacggagaaatattttagtataaaaacagggtactcttttttttaatatggtttgtttgcctggaaatgtgccacttcttcctgatggaataaagtaaggtgaaagaggtgtttgtagtattgtattatgtaatttctaatatttgatggtatagatcctgattactcattcgtttaactgtggatgcatggatctcagttatctaaaaaaaatttccagataaataactagtatattgcacaatatattgacaaaagtaaaaaaatttaaaactgacagaaacaaatgcctatattgttatggaaaacacatatttttaatatattattgttagaagtgtatattttaatgaaatataaaaacttttttttattatggtgttcttcaggtactgaagtataaaatatatatctaataaagtaataaaatatcataaaagataaaataagtaaaatatttaatgttgctaaattattattttttctataccaagtttctgttgataaacttatttagtatatttttgttcaaatagtaagttgtattagatggggagcacagaattaatttattacaaattttataatgggttgtttgttatcccacaaaataccttttattatgtatctctaatttataggtattaggtagtttgttgagctttattctgtatgcttagcatatagtatttctaaataccaattaactataacaaaatatgatcattgatttttatataaattgttatttttattttgccattatatatattttctttgttataccttacaagtattagaaagtaatttggaaattttgaataagtttgactttgtttatgtttttagttaaatttgttctctgttacacaattttttattattattggaaaaaatatttttatatttagtttctttctgtgccattgaaagctgggagaagttgaaaaataaacaaatataaaaaagaacaactttggattattaatagttagtatttttaattatttatatatcaattattaacaaaaatataggttttgttaacgcaaggcctcagtatcaagaactctattaacatttattttagattattataatatgataatataaattacaataggatattggtagtattacgaatttatattgtaagtttaaattactttatcataatacttgaaaattgttgaaatagaatgttctatgataaaatagatagaacaataagattttagcagacactaaacgataaattgttgagtaataattgttgagaggtcaccaaaagttgttgagtttatttattaaatatcttactgttcgtagaggaaaatggctgaatgttaacatatataaagccaaggatttcatcatacattatttttatcttatttacaatctttctatattattatttctatgttgtatatagagaaagaaagtgaagaactttattataattttgtatactaaatctgtttaatataatattgagaatgtttactatatatccaatgaataaaggcgctcattcccaacaaaaataaatattaatagagttcttgataccgaggccttgtgtcaacagaatcattaaaataatataaatgaccaattattgaaaaacttacttaaaaaccctctaattattggaaatgtacccgaggtaatcatcagcattaatatttgtgttatatctaatagataacatggctaacaataatatcaacatcaaaaattctatattttttttattagttgaaataaacaacttattatttagtaaatatccacatataattattatctatatcttgacgtattatttgaaataaccccttaaaattttgaacaataccagaaaattaaatgctaatttttgtaacttttttctatttcgtatataatgaatgtttaatatcatcaaacagtttagaaatataaagaaaacaatattatatacctaatatagtatcctagttcacactgtaactaattattcttcaaattaaattaattcacaaaaataaaagaaagttaaatcataaaggtacaccttaaaaatattttttctcttataattatattagatatgcatagagcttgcggtaaatctgatactactttacaacctagtaaaaatacggaaattctttatgaattcaaaggtttccaatatttttcaaatggtaaacacaaccaccgtatcaattctatatctaaaattaataatcctgattgtaacaaaataaatattagtaaatttttaaataaaaatatgagaatttttaggttattgagatcatattgtaaaaaatttcaaacaaataatattgaaaattcagtttcacttttaccttattctaattttagttcaccagaatttttagattctataccaaaagtactcgatccaaatgcgtttataaatgtaaaacaattacaattaattgccttattatctgaaagaatgaaatgtgaccctcataattacaaggatttagtattatttgatcaatggaaaaacagaccttcaaataataataaatgtatatttaaatttagatatggaaatttgctaagtgatatagaacaaagaggatcttctaggcatataatgctcttttccaaaaaaaaaataaatgaaatagattttgaaaactcacattttacatattgtaatgatggcaacatcttttatgcaataaaagaattcaagaataaaaatccagagaaatcttttgaaagctatcgtagaggtattatatctgaatttattattggaaattgcttttttggaaaatgtgccaacattgttaatatttttgatataatggaggtaaatgattccagatatgtacaggttatggaattatgtccttcaggtgatctttatgaatacgttaaaacttatactaaaataaataaaaagatccacgtcattgaagcagattgttttatgaaacaacttttaaatggcgtttcctatatgcatacacatggaattgcacattgtgacattaaattggagaatattcttttttacccaaacggtttattgaaattgtgtgattttgggaatagtacagtatttcaaacggcatgggaatctaatgttcatgaagaaaaaactattcttggaacacaaccatatttggctccagaagaattcaagaaaaaaccttatgatccaagaatttctgactgttggagttgtgggatggtatatataacgatgattttaggtcattatatatggagaaaagcatcactttctgaagatttatcttttaaaaaatttcataatgaaatggaaagaactggaatgttccatatttttgaagagttaactcatatatatccaattaaagagttaactcgtaaggaagctctttatagaatatttgatcaaaatccaacaagtcgaattactgttcttcaattaataaatacttcgtgggtaaaaggaattaattgttgccaagattaaatcctaaaagtcattacttgatctataatctcgaatgaaacaaagatcctatcctctttttataaataagtttctatttttctattacaaaatatatacagatatacataacggaacgttacatggatggttaatgaagaatatatggctgatattatagaaatatacaagttcagcctttaaagaaaaggttccataataatccacttttcaaatattttaccactaatagcaccactacaatcgcagtgtgtcatactaaatttatttcgagaatatcttatttttatactattctactagctagagaacatatctttttgtagcccttatctaacagctctcttccaacaacaccatcattggccataatccttgtccctaatggatcaccagtgattttattaattaaaacacaagcattatctccaaaagaaatattagaaccatcttttctatatccattcttttgttttgttctcactataactgcatgacatatatcacctcttttaaccctattagaattcgcagtaccggtaatattttgatttaaaggtctagctttttgaataacacaaactattctatcaccagtagtcccacttgatttaggagatcctttccttaagattttaatacactcagctaactgagctcctgaattatctataacttttaacatagattttaaatatatcatcttgcaatctttactatttgataatttacaaaaattatatacttttatatgctttagatcttgataaggatgttatctgcattaacttggacaaattgtggatactagtccacccgattcccgtccatcaattcctgccaaccaatcctctttaataaaatttcatttcctctgttatccttttaaattttcaactttatttcacaagtttcaccctcaaaatacttctggcttgtttttctaaccatcccgaaatcggaacgtgaaacaaaattatggaaaggaacaaaaaacaaacaacaagaataacttaaaacaataaagatatctacttctgatgattaatgacgctatttaagaatatgtaaaattaaaattcattctatactaataattatatggttaaaattttgaatacgaagatagcatgagacataacaaaaacagtttttttctttagtagaatagtaaaaaaagaaaatacaaaaatctcaattcttcttgaacaaactattagaactactttttcttatataaataatccaacttatcttcaatagttttcaaatcccatcgtcggtcaatccttatggttaaacatccagtaacaatatctgccaattctttgtacctatttgaacaaacttcgtgaagtggtgttttatcatattctccagacttgatcaaatctcttaaatgtgattcagtaagatgtttaaagggaaatcttccaactaacatcgtgtataacatgacaccaaatgcccaaatatctgcctttttatttaaattattatccgttagcaattctggtgatgcatatggcaatgaaccaatatgagaatccttatctttagcacaacaatcttcaactttgaaactcataccaaaatcacaaataatagctttccaattcttgggtgtagatttcttatgatttttattaattaaacaattttctaatttgacatctccatgaacaatccccatatcttcatgaagatattttaatgctctaataatctgtcttgataaaattattacaattttacaacgtgcaatatgtgatatttttgaattggcaaaattatcccatgataataccaaatcatataacgtcccatcttcaaccaattctgttaaacaatacattgcataatcatcgtcaatctgataattaatcaatggcaatatattttcattttttaatttactccatatatcaatttctctcattacactatttttaatcttttcattattcttaaatttaataatcttgatagctcttaaggatccatcattattatcaacacattttctaatcatgccccatgccccatatcctataatactttctaatgtatgattaaacaattgcatacctttctcacttggtcttacaaaatttgatttcagacttgaagataatccagtgttattattattgttattattatttaaattcagtattgatgtactaacaggtgaaaatgtgcttaaatattgtgatgccacagaattatgcctatttattgataaattcgaaatattatccaaattcgaataagttttactactattattagtttgattattattgttaaatatttcattgccgttgtccaagctattcggaatatcaaaattaaaggatcctaatgaagagttactctttgatgatgttaaggaaactttcttaattaaagacataatttctttgtaattatttgatttttcattgggtaaaacagctagaatctttgcctttctttgagaataaggtaaatttaaaaaatcaattggaagtaatttaatcaaagcaatcaattcatctttatccattgaaatataaccattaaacttactattattattattattattactgttattattattaaaatattgtctacacatctcattatcatacttcaacttatcacttttattctttgtgatgtcaattggcatagttgacatatgtaacactgtgttattataattcatttgatttaaagatgattctgagggagaagatgaactatttaataaataaggagacctagaactcatatttccatcaatacttgccatagtggtatctgtcgatattctagttaaaggggccgttcttgatgttttaattatactgtcagaattacttggaatttcattattattgtcataatagtgatcatgatcattgtatagctctaaaatatttgaaatgccttgttttggggaagaaaatccacgtaaggaggaaggtcgtcttgatcttgggataaaaaacgatatttgattttgggccaatgaattaggagcctgtcttagtgtattcttggcactatttgattttgccgtatcatttttattggggaaaccattattaacattagaattcagaagatttaaataagaagaccttctttcgacctctaaagtagatggtgtagtccatgaatttttgaaactaggtagtgggatcggttccacttgggaatgtgcagatttatcatttaaagccaatacactattactattacttcctggagtaaaattatttttattagttattctttgcggggaaaagccgaaagaatcatccttttgatgatcattgttattattattttttgcctgttgatctatataattttccaattcccatcttttaacaattttattaaagttcaaatctggcacatactcattcttttcactgttaatctctttttggatctgctcattgtctcttttataaatatttcttggtttaaagactagcaaattattattatcatcatcatccatatctgcaacaccttcttcaaccttctcacctataatgaaggaagattcattagaggaagaagacgatggtatagaccttgctgtccagggtaaccttttataagatttactgatattactatgaaacattgtggtctcactattcttatcattatgctgttcctctctattttgctcaactttagtattgtgaagattatttttattgattagcccattttttaatgttcttgataacatattattttaagatatctcacagaagaaaaataaaaaagtgctccacaaataccctattagttacactaaattataaagcagggttgcctttgatatgctcttcaagaaagaatttgaataattttattccctttatttctgttctttctttctatattttatgaacacctatgactatggtagcatatatgttttcgcctgatttaagctaaagtattgagagacagtacatctgtatgaattcctcattatacttgtgctgcagggcaaagaaggtgattcaaaaggactgtcatccattttattttctttatttccatatattggtgtgtgttcctgtttattattatcctgtttctcaaactccgatccaaaaattgaaagaaaaaaaacaaaaaaaaaacgaaattacaaaaaaaaaaaaacaacagacaccctctggaggtgtggatgttgaacaaattgcacgtgatctgcccttaagtcaagagacatggcacgtgccagaaaatgtcatgagtgtataagtgacacattttatgaaaaaggcacgtatagtttaaataaataaatgaataaatgaatatatatatatatatatatatatatatatataaacaaatatgaaccacttcatataatagtttatttatctctcttataaaccttgtttaaaaattcagtcaatacttgacccttgaaaccacgggattcatcagtcttggcaatcatatctttcaatttagtagcaatgtcttgttcgtagtccttgtataattgttccaaattcaattcattgaacacttgcttaaccttcgactcggcttctgcattgtccttttgaccatagttcttatctaaaacggcacgttgttctggagaagccaattccaaagccttgttgatcaaccatgaacatttattgtcttgaatatctgtaccgattttaccgatctgttctggtgtgccaaaacagtctaaatagtcatcctgaatttggaaatattcacctaatgggatcaaaacatcttgtgcttgctttaagtcgcgtgggtctgtaatacctgccacgtacatggccaaggcgacaggtaaatagaaagaatagtaggcagtcttaaagatgacgataaaggaatgtttggatagagagaacttagataaatcaacgtggtcttcaggagcagtaatcaaatctaacaattgacccaattcagtttgaaaagtaacttcatggaacaattccatcaaatcaacatagtatttctcttgacgataatatttcttcaatagataatagatcgcggcttctaacatgaaggcgtcgttaatggcgatatcggagacgccttcgactctgtaccaacatggttgaccacgtctggtgatagaatggtccatcatatcatcagcaactaagaagtaggcttgtagtaactcgatacaccatccaagtaaggcaacttttttatattcttcatcatctaaatcttgtttacctgtcaaaatttgatatgtgtcaactacagacaaaccacgattcaatttaccgcctggtgtgttatgatttaaagaacgggtaaaccaatcaatggcttcttgtggcattttgtatgcctttaaggcattagttaaatcctcgacaattgttggaaacacctttaagaacctagctctcttatcagacattgtttatttatttatttatctatttatttatttgtttatttatttgtttgtttgttcaattgatcaaccactattattgacgtatactatttatgaacaagaaacaacgacaacagagcaagagaaggaaagaacaaccgtgatcattcacatagtgacccacctctattttacttctatataaaggattcaaaagtttggagatctcagtttgatttttattacgaagccttcgagcgatttgcaaaaaaaacaaaggaaaagggaaaaaaaagaccgcagaacaatgcagcacccatacatccttgacggttaaatccgtaaatttacatccgatatatctgtcaataaaaaataaaaaaagcattttcttccgaaattttacgtattgcttccatgtaacatatataaatatatatatatatatatttatatatatatatataaatacatgcatgtatataatgtacagttgacacttatctatggctattttaatatgttgcatttgatagcagacattgaataacaaacagtatgcattctgtaaatataaaaatgaaatgactaaaaacagttcttctcttggaacctcaattctactcacttctttccactgttttcttcttttttttttttttgtcttcttttattttgttttgttttttcagtccccctctcttttctcccctttattattactattactattattattccctgtttctttttcttttcttttagtaacgacgttgacgtctagacttacctggtctattaccactactacctttcattttcttatgggaaaatccggtaatatctgcagacgattcagcatcgttcttccttttaaatctctttaaaccacctttaccgtatttattattcttagcagctctcttggcactaggcttatgtaaggtccatctatccttattgtcgtgtctatcactactgccaaattcatcttcaatctccacatcaaagtcttcaccactgatttcattttgttttctcttcttcttcaagctcttaatcttgtccaatgcctctttcttctctaactgtctcttttgtaacgtagcaatctgaacttgtttaccaaacttcttcaattgcctctgtctacgtgcctcttcacgggcctttctttcgcttgcttcggcaatcaacttactcttaatcttatccatgtgttcatcactcttaaccatctctgcaaaataatctaatggtctaataaatggtattttaagtttcttgtgtaaaatttcgtaactttcgttgactgcatccaaggactgtttataaaaagctaattctctttcagtgtcatcatatatatcctttatagtcaaatcagtattttctttggaaacaatactttgatgttcttcaaaagaatgtttagaccatggtaatgatactctttctaaacaatgtttaattgctttgacattattaatagttaatttactgtgtggtacaacatctgcatcactatcaaactcaacttctgataatggcacatcttcttcttcttcttcttcttcttcttcttcttcttcttcctcctcctcctcctctttgtctatcttttcttcctcattatctttttcactttcactctcactctcttgtaatttatttaaatctaaagtcctagcttcttcttcatcatcatcttgctcttcttcttctttttcagctttttcttcttgttcctttgccttcaatatttcttccttcttttgttgcttctttaattttcttctttccttattcgataatgcttcactcttatattctttttccttacagttgtcttttacaactgcttcatcatcaatttccccttgtagcttttcttgttccttttcaattaatgtagaatgatctaccacagtaacttcatctttctttaattcttctttattcttagcctgttttgcctcttttaatttctctaatttttgtttctccttttcgtttcttaatagttcctttaatttatatcctttagccatgatggattctgacttcttaataacagtaattctttttctctcttttttgttttttttgttttactccaccaacaaaggtatagctgaatatatattgtaaaccgagtataacaatgtttctcgttaacagaaatggttatgagtaagctcttatccgtgttaaacttggcacttgttatcacttctattttattctcatcttattattattcttgttatattgtatcactatattaatttactttaattttttgcgatgagctttccaaacttgtcagaaacaaacaaaaaaaaattttttttcctaagaattaaaaaaaaaagaaaaaaatttttttctttttttttttatgttttttttggtaataaaaccttaaaatttataatcacctcgttccaaatgatctttactattttaaatacatatatatatatatatatacaattacatatataatataatgcatccgtaacaagacagtaaaatattgaatagatcaaatattacaccaattctgcttctttcaactcttcatagagcccagaatcaacataattagccaaagatggtccatgttgttctccacggcgacgacggctcttcataacaaaatctctggcaattgcatctcttgtagcaggcttcaattttggtataactgcatcttcattcatcacgtctccaggcacacgtttccatatctgattgatatactgtagttgacatgtggactgtccctgcgtgaccaaccgcaagtccacttcaaacccaactgattcaattattggtaaatgcccacgtatctctataaatggacttcccacaattggtcttgaattaattatttgtccgcctcttctcttttgaaacaattgattcacaacctccatatacactgtcttagtcattatgttcacttcatatattggctctaacaaatttggtgtagctgtcataattgctatataacatgcttttctaatcgctgggatcagttgattaatgtttatcgctgtactgtcatcagaaccatctagtttcccaaattctaatattttgaactgtaccccatgaataggttcaccacataatggcccctcgttcaatgcccagaagaacccttgtttcaagatgtctttacaatcatttaatagatccttgtccgtttcatctgataatgtatcgtcaatcaatacattagtaccactaaacaaccaaacgtttctcgatgtcaatgaatcccagccatatttgtctctcaatatccgtgcaagttgtttcaaatcctggtttaatggtaaattaccatttaataaatccttcaccaatcgtaaatccatctttgtggcaccaacgcttaatttaaattttgaatccattgtctccacaggaatcgctgcaaaggattccccatcgcaactttcatgaaacacagtcattggagtagacactttgatctccatttgaccgtagacttcccttaagtcatacaataggcaatccatatataattctcctgtacccaatatcacatgttctccggagtcctcaactctgataatcacaccaggatagtacttattaactttatccagtgcattaatcaacttgggtaattctcttggctgtaaaggtgcaatacttactttaaaataactcttgttaatataatccaattctcttaatcttattgactccggtatatcattcacagaacatgtataaatggtaccacacttaattatttcgtcctttaattgacttttgattaatactaattgaccttgatatgcaatatctacaggcatactatattgtccatccatcaatataatcttttcaactgagtaacctaatttactttgaaactttcccttttcttgtgttttacttggttcatctatttcctcctcatcgtcatttaaaacattaaatttagatcccaccgtaatatttcctgcgtatatcttaaccaaacaatactcgtcatcataatagtccataaattttaagatatggccaatcatctcttgtaatttcaaaggagttacatacggtgaatccaacaatttttcaatacttgaatacaaaccaagttgattctcgccaaaaaatcttcttaagacaaatcttaatattggttgaggatcttgtaagtagcttggtatttttgttcctttagccaatacacgtgatttgatcaactgttgaatcaattttattggatcttcataagttaatgtacttgttatcactttataaatagggtaaagaacaaactccataaattggtttttattccataataagttaacaaactttcctctagtattctttaaagagacctgatctttataatgcctttcaacaaactcttctaatgtaaatgtgaaacctaatttaccagaagcaaatataatattatttaactcaggagaaaacggacctaatgaagtttcaaatttacgattcaaatattcaatatattgatttaacgacgccactgtgtgcaataatttcaaataagtatcttcaggtgttagttttaattcaagtatcaatctatcaaatttgttcaaaacaaacaacattttcttcctatattttatcgattgcttaatcaattgttcaacagaagcagtgacaccttccacaacatcaatacagataattacattttcacatgcgtttattgcaatggatacctcatccataaaatttacatgacctggtgtatcaagtaaattaatgactgtagatttatcatcaaggtcattagccaaaaaagttatcccattcaattttatactcatccttctttcatgctcttgttttaatgaatccataaattttagttgtttccaaccttgtataactgaatcagtaacacccgctaatgaattcgttctgtgagtgtccatcacaataagatctactaatgatgttttcccagaattttttggacctatgattgcaacatttcttattctttctggcatagcagacatattcaccaaatatttcacatcatatgttaccgggggtaaagcctttaccgtacttcttattgaatttttatactgtttaggatgaaatttagatctcttgggtgctattaatggttgattcaaagtttgtgtattttcggtttctacaagaatattaacttcttccatattggtctttgtattttcatttgccacatctatattatgattaatcaattgcatatgattatgattcagatcattttcttcatcatcttttttctgaatagccaaagaaccttctgtatctactgtatctgtgagcttcaaagtatattctaaacctgccttggacccaatgacatttccaaactcatcaaatatctcttcatccattgtgttatctcacaaagtatcaatctcttgtatagtaaacgttagctattaatcttctaatattatacacattagaagaacaagctttttcttaaattcttcgttttcttttatatgatttccgattctttttagtcttctcttcttgtcttccaaatgtggctttaattattttcacattcctcgcaatctttaaattaaaaattgaaatatttgcgaggtatgagagcaataaatgtatgtaatctgatggacacaacaatacaaggactacttaaaaatatagctttctacaaaaaaggcttaagcctcgaaataaacataatactttttcacaagctaagtatttgaatctttaacaaaatttagtcaataagatagtgattagttttctattttctctgtttccattccattgttggtaaaataaaaaaactaatttgtaagatcttctactattaacacattgattttaagatctgtagatctttagtggctactatttgtgtttttatgatttattttacttcatcataaaccataaaatttttattgagaaccaatatttatgcattacaagtgaaatatctaactacaaagtgaacgagaaagaaagaaccaaatattaaagtagaaaaaatgccatcatataatattttgccagaatctgttcgagatggtatacagacagtaaatttggatcctaataatttgtttgataatcttcatactatgatccatgaagactcgaataacaatgaaccacaggttgtagaacatttcaactatcaacaagaattagataaatcattgttatcaagaggctcaataattggattagggttcagtttaatgagtccagttttaggaatgtgcaccagtatgtcaattggtttacttaacggtgggccccttaccataatgtttggattccttatcagcggtttttgtatatggttttgttctttatcattaggtgaaattgtatctaaatttcctatggaaattcatattgggagtgccatgttagcaccagactcctttaaattgatttgctcatggtatactggctggttaatgcttattggaaactggactatgagtacaagtattacatttgcaggtgcccagttaactatctctttaatacttatgactaactcagatttgatagatgagactcatttaatattttatactgttatcgtcttctatcttgtagtaactattgttggatttatcaatttgaaatttgcaagattcattgagattatcaataaagtttgtgtatactggatcatctatgctattatattcattgatattctactgttaattttccataaaggaaaataccgttctttgaaatatgctttatttcattttgataatagtttgtctggctggaaaaatgtttttttatcatttgttattgggttccaacaatctaactttactttacaaggatttagtatgttaccagccttggcagatgaagttaaaaaacctgaaagagatattcctcaaggtatgtcaaatgcagtccttttgtctgccttttcaggtattatatttttattaccagtcatgatcatcctacctgacatagaaactttatttacaaatcataaagtgttacctattgtcaatattttcacccaatctacccattctatgattgtatcagttttccttatcctatcaatcttgggaaacttattcttttcagggattggttccattactgcatcgtcaagatctgtttacagttttagccgcgatcatgctatcccgtattataatttatggacttttgttaaaccagaatcagaatcaaaagttcctaaaaattccattttattaagtatggcaatctcctatttattgggtattttagcgttattttccactgctgcgtttaatgcatttattggtgctgcagtattatgtctatgttctgcaacatgtataccattagtgttagtattatttagaagaaggagagtgttaaaaaatgcgccaattaaaataagatataaatttgggtgggggattaatatattatccatcatatggttattattatctatgttttcggtgtgtctaccaactagaattcctgtcactgcaaagacaatgaattatgcactcatagtctatgttctttgtctcattataataaccatattatattttaaatggggaaaatataatttcaaattaccattgcatgaaggtgaagatatcataaaacgcaataatattcaaataacaaatcataatggatatgctaatctaaatcaagatatatccgaaacatttgatgaagaatcatatgtgttacaatctcaaaatacaaccaataataatatgcaatttgccgataacaatgataaaatagaggaaattagtacaaataaggttaataggcaaaatgatagtgcaaatataacttcaatatcggaatatgacacaaaaattacaaaacaagaaggtccacccataacatttaatgatgacagaaactcgttcgagttagtatccaatccatttgaaaataacgttaatgaaatatcaccaacctatgaagaagttaatgattgggattttgctgtccaagaaagtatcaatagtgacaatcacaattataaaaaaagttttatagagaataataagaacacagcagcctcatagaaatcttgctttatgaaaacaacaaaaataaaagcaaaataaaacaagataatattaaatcaacacatatcttctatattgttatcatagcataagataaacaaagctatgcagtagtgaagagctactatacaatcgccaattcaggattaatattaatttaatctttttctggttctctccatttcaatattttattagcctacatatattcattattataagctatatactcattaacatttcttattttattctcttccttatattcagattttatattcgtttgtctagttagaaaacagattgcatatatatcttcaattattcgaaaacttgactagctataattaataaaacaccagcacaacaccatttcaaacaagtagtaccggaactatgattgttttttatttcttcattcccttctccttgatggtgatgatgcgcatcactaaacccaacaccagtttgaaacatttgcaaacctataaatagtaaaaatcctgcagtaacacttaaaaagaaatccatttgcaattcattttcattagcctctgtcttatggccaaatatcaagtatccaagtaaagcacccattggttgagaaccaccaccaagtatggcagtaataagcactgccaaccatttagtttcaaagattgcatataatggtagagtcatagcgaaaccttccacaaaattatgtattgttagacttaaaaagattgagaatcccaaagaatctggtgtatcatctttattcgtataaaatataataaatccttctggaaatttatgtaatgttaatacaatacatgtttgcataccaatcgataacaatttggagaaaggtgtttcgatgtgatggtgatgtatatgtgatgtttgcaaagaatgatgacgaataacataacctgaatgaggatatgactcgatttgagaaatatgattttccaaatcaaatgcattaaaattattagaactattagtcataggagtgtgattgtgttgatgatgatgtgaatttggcaaaagatgattatttaattcttcatgactatcgatgctatttgaatcatgagtagacgaaatggattctgaggtagatccataatgattctcaccattactactactactactattagtatcatggttatgatagcttatgttagattcatctttatcagaatttgcagaataaaaatttttacgatataatgataaattttctaaatcataaccaataacgttttcaacacatgcaagaccttgttgtgtttttgtcaatgaatctaaattattagagctcacatgatctaaattatgtgaatgacaattattattattacttttatttgatattgtaggaattatattatttgaagacatcatagcaattttggaacaaggtaaatcactagtctccaaagttggtgtgcattcacctaaaggacagcaatcaccaatagattttttgttatttttagtaaataaatcaattaatgatttaccaatagtaataaattttttctttgaaagagttactgtaccgttcttattattaaaattaatattctgattatcattattctctttaacgccatcatttgtatttggaagtaaaggatctgattcagtgtgtgaatttgtatcattggaatttccttccccatttggataatcttctctgtactgaatttcataattaacattaacttgatgtgctagattatcaccgttattattattcctgttagttgaaggatgttcatcttcatgttcatgtttgtaattatgtccatgataatgagtatgatcatgatcatgtatcccactgtgggttcctccatgaccatgctcttcttcttgtccatcaccatgtgcacaatgaaccaaagactcactagcatatacatgaacaatatagtttaataaaagactaatacagacaccagtaagcacaccccagaataccccagttctattatttttattcatctttggtaacatcatgtataatgaagtggttaacattgacccagcgctcaacgataacccataattaactaatttagtattatttgatgaccgtccatggatgttgctattgaaaatggtagacattaaaggaacacaaagtgcaccagagatacatagtatcgatgagatcaaagaaaatattaaccaacgaggaatttcttgcataaacatgatcattagtttaatattttaccgacccaccgttagtataacaaacacgaaaagaaaataaaagccaaaacagaatttcaccacagatgcagtttatgtttaaagtatagatatatacttatctcaaccaaatttataattatcagcttattaattactttaatatgcaaatctaaatgctcatatagactgcaatacaaacggttattgctctttatagtattcgtactttatattatttttgacattcgatccagatcttttccttgtttcaaaggagaactgcactgccaaagtatcttttattctttgcctttatcctctctttgctgcatttaactgtgaaggttatgtatctgtgaatcttttgcaggtctccttttcttcttttttttttttttattttttaattttttcttcttcctaaatacaaaaaaaaaaattttaggaaaacccttattccaatcgtaaaaaaatatagggtttactgtccaaagtcaaatatgtcaagaaataaacctaaattgtattagggttttaacggaaatagaggaaaaatcccaatgcttttcgtttgtctttctccccttcaatcatctgcatttttgatatactttatctctaaaaatagaaaccgataaggaataaacaccaattaaaaatatataaatcctagtaagttatttgattcatgtatgttgatgtctcattcaaggaccaatgccatgcttcatattcgtataaatagatccatttaatagaatatttactataagagtatagtggtaaacaataataatatacctcgtgcgagaagtgatttactataaagatatacatacatacgtacatatatatatatatatatatagtgcggtattaaaagtgataatcagtggacataatatctaattaatgatatttgattaaattctattcgatattgcaccctattacgatattgttacacatatacatttacattccatttcttcaatattactattaattttatagtttacttcctttttatttatttttattcttaagtatacccaataatatcctctatattataaactgaaccaaaaaaacagaagaaaaagaagaagagacacactcagaatattagatttagtcacatatgcagtcttagatatctattaaatattctagtggttggtagaaagaataattcattataatagtaattgcaacctatcgttatacatttgtgtcccttttttttttgtatgttgacactcaattaaacagcaatagtaataatattattttttgccaactctctttttttacttaaaatatgttaggaaatttattcaataaaaataatagaaggaaccaaaataataataataagagtaagaatgattttaatgaagcaaataataactattctatttctgtgacatcagttaaagataattttatatcagataatgattttgcatcaacgagctcaaaagttttccaaaattttaataattattcatcaaacaaccaccatctaaaacctactacggtagtagcgaaaagcgctactggtgcatttctaggctccaatcttgacgacatatctcactctcaacaaaagaaatattttcatcactcacaccatatcactaatccacctatattagatcatatctctgatgatttaaaatattgtttattcggcacgaaaaatgtactttattccaatactacagacactacccagatggctactataaaagataaaaattacgcttttaggattcttatagctgaagaaaccggacaaattgcatgtagaaacaactacaaggtctctttagattatagttttcctcgtggttctgatattgaaaaaattagaccaaatgaattaaaacaatacacttttggctccatggtaagaactaatgattctctaaaagataatgaaaagtttagagtgatccctaattcggaatttattttaataactaaaatctttcattttaagacaataccgaatagattttcgatatcgttatgtatcccaaaaattttattatcagtaatcactgaatgttggagtgatatcaaacaatggttagatttaacccaaagtttaaccattttacaattagaaaaaattgtaattgataatacaataactaactataacgttggacttttaccaccagattataattcccatttcccaaaagttgtagacacaattgttcacgatttgcaaagaagaatgataccttgttttaaagcattttctgaaatacccagattatttatatacccagaaatttgcccggagtttgtgaatacttggtttaaggaggtttttaattggatagaaattaaagacggtcctaagttaaattttttgtccacattaatagctacaatattgttagatgttaaagattttctgatagaaaacaagtctacaagattggtgcttttatctggtaatcccttagtggctaataaattagtattcatacttgcaaacctgttggaaccaagatttagaggatctttagaccttttcaataaaccacatcctgataaaaatattaataataataatattagcaaaccaactaacccgataaaggaagaaaatattgaagatacagtaactatagataaaattttgacttacaataataaatctcgtaaaaataaagaacacaatatagataaaagtagtctcactcctaccaaggaaacagattcaatctcaaatattctaattaactcgccctcttcacaaattttttatgattcaaaaaagggttgggaaatcccccaaaaaaaatccagtagttttcggtctacatctttgtcatcagatgattctatagctgaagttattcaaccatcatcattcaacagtggaagcagttcacttcgatacctgtctacctcaatatcgagccaaccggggtcttatggatcttggtttggcaagaagccttcattgcatcgattcttatctcagagtccatctataaaaaataatgactcttgggagagagtttccataatatctaatccatacagtttacagacttgtaacaacaacaccaatataaatggatgtattaataattattgtagtccatatagtagcaactcaaacagtaatagtaacattaattgtactgtacaaaggagttcaagcgggacttcattatttcaaaattttaatcgtttatacaatactgggagtacttctaatcaaacaccacaaccgtcaccttctattagtgagtatgatgaatatccttggtttggaacaactccagaatcacctaggatggaaagtggatctttaaccatcaataataaaccattatggcagaataaaccactaaacaatattaacataactagggactgccagaagatcagtcaatcaaatgttatagatgatgcatttgaaaggatatgtatatcctccagcgcaatttactatgataatgataatgataataatatgctttttggagggagtatttccaagggcacagacacacatgctgctgtattagaactaaattatgaaccaccttccaaaagagatggctttttagaaacattaccaagatatacatcatatattactcattttaattattggtttcaaattcaagcaattccaattacaccagattctgaaagacacatcatttcggcaatgaagaaagatttacaaaaagatttatattctaataccttttatgtctcgctacggtccagagaaattaaaaaaattataatgaaaaaagacattaaatctgaagcagaagtaaatctgaaacaaagaattagaatgatttttaataatgggaagtatggacacgttactactgagtttatgaattgtattgaattcgtaaataactctgtgaagaaagctagaacattgtatgaagatcgcgaaatagatgttcagacaagagacaaccagctagtaagcatctttttatctattttaaattgtaataaatgaaataatacgagttctattttgttcgttaatactgcacgctataatacatgtatttatatatctttatttacattttttcctatttgcatttgtttatttattgatttttaagttatatcaaaattaaacataattataatctaggttaccatatagtgactgatgtgccttcaattaagcagcttaacaaattgtttattacctgcgattctctgttgaaatttggcttgattgaggttctatgttataaagtgtgtcactttatttttttcctcattaaaattttcattgtgacactaattaggaaagtcttttgaataattagtatgatcccattatgaaatctatagaactttcaaaactttattttaaatatcaaatattaaaacaaatagtgtaaataacatatcaaaagttgagattcctgcaaaatataaatacaagaaaagaaagaaactttaactttaaaaaaattttagacttgatctataaaatattattaactttgcgaaaacatttacatataaaaaaaacaggtaaactaaactactagccaaaaccttaaattgttattaatgctaaatgtcttatgaagcaacaattattagtttgtgcacacttgcaataattgtgttacaacctccattattttggcatgctcatactagaaatcttccggcagtgattcttatattatggttattaatcattaacataattaacattattaatgctgctatttggagtgggaatgattttatgtcaacctgggatggaaaagtatggtgtgacattgccataaagatagatacaggtgcaagtgttggtattccatgtgccattacagacatagtttataatttacatactattttaagggcaacaacagttctagaaaattggaattcctatcgcaaaataatcagagatttactaatatgcttattatccccagccattgtcatggcaacatcatatattctacaagtatttcgatacagtatcttaagatataacggttgtcaaaatgcattttccaacacatggccaactttattattatatcaactgtggattgttttgtgggcaatttttgcagcattttattcctttttagtattatttgtattctataaaaaaaggaaagatgtgaaagatatattatattgtactaattcaggattaaatataactagatttgctcgtttattgattctttgttttgttataatcttgatcatgttgccattatctctgtatggacttgtacaaaatgcacacaatttggaaggccattatagttttaagggtatacactcaagtgcgttatggaatgttattattaagatagatctgggaaaaccactctacacagtttggatctatatcctagcatcatatttagtatttttagtgtttggattagggtctgatgccttatctatgtatgttaattttctgcgaactattggattgggattcatagtagacaacataaataacttttataaaaataaaaaagaaactagaattggaaaattgttgaactatatggttaatccaaataccttggctcatactagttcctttcaaggaagtgacaatgaatatagaaactacttgaatgaaaattcactaggttgtaaaattcccaatacacaaatttatgtaaattatgatatgcctgaaacaagagaggaacgtttttatagtaagtttgaaaaaaaacgttatgatcttgaatcaaaatatctagaacaagaaattaacatagatgatggtgaatatatcccatatttagatgatgaaattagtaaagaagaacaaatattatttcctagcttacgtatggaaaatgaaacagaaatttcaaaggattataacaatagagacaacatgagatttcccaatttagaaggaaatataatgcaagagttggaagacttagatagtgaagaaatagggaaagatttacttgaaaacccatttactacaccaataattcaaaaattttcctcagaaacaaacgaaaattaatttatataaaaatattataataagacatgtattcttgctaatgatgttattattttaaattcagcgaaaacaaataaaataacaataaagtaattataacatattctttataatacatcttagtaccaaactacaggggaattttgattcctaatcatactttaacaaagtagatacaaattaactcttttatgtagcctttgcatttctaattttaagtacatgtgtgtgtatgtgtattatttacacatggtaaacataatttgtgtcattttggactctttaggtaattgtgtccttcttctgtcactaaagttttcctaaatttttttatttttttatatttttcctgttccccccttcactctctgctacgaatataagcaacgtatggaatgtgagaaaacaagataatgctgaattatattgaagaagatgattgttaaccttcgagaagtttaagacatagtttctctaaatttcatcaaaccgtaagatattggctacagtgcaatttgtgtttgctaagttcatatcagcaagaaaataaacaaagagaaatgaacaccagtatatatgagcatgctttaagcgtatggtctaatgcagacttcaatacgttgcaaaagaatttagataacaatattcttgaaatcaaagatagggaaacttcatcccttgcatcaagaaaaaatctagctactgaaacaaaacagtttaagaaacttgattcaggtgagaaattagcacaaataaataaaattatcaaacattatcaacaagaaatcgatagtttgactcaaagatcaagagctgcagagaaatttttatttaatatatatgctaaactctctgaagcacctgatcctataccattgctacaaaattctatagcagaattgagtaaaatgaatgattcaaataaacttagagaacatattgatgatttggaagaaaagcttaatcaatattctgattatgatgctttgaaaaaacaacttcttgattttgaacaaaattctgaagtgacattatctaaaagattaattgttaaagaagatgaactaaattctgtctggaaggaaaaacaaaggcattgggaagatagagaaaaagacttacaaaaccagattgaaaggttacaagaaagtaataaaagtttagaagctaaaatatcaaaacaaaccgatatgtctggatctaatgaaatcagagatgaaaataaaaatgatagatctgaatccacaactgaagaaaaaaatcaaacaaagatagattcttcagaattcaatctattagctcaagaattagagactacacaagcaagggtactccagctagagaaaagaaatgaagagctgagtgggactttgaaacgtgttgaaagcgaaactgccaatggatcggtattacactccaagaatgttaaaatcaaccatttagaaacagaaaatgctttattgactgcttcattagaaaaggagagaacgttacactccaaaaaaatagctaaaataaaggataaattacaaaaattggaaacagtagtttccacatacaaatctgaattagacactacttctagaaaattacaaacttatgctgattatgatgaaataaagaatgaattatatgccttgaaaagaatcgagtttggaaccagtagtgatatagaagatagtaatgttaatgataacaataatgatattgatagcatcaaccatgataaagctaaaacaaataatgtcggaaatactttattagcagctaataaaaaattacaatcgtctcttagtgaattaagagtgtcatataatgatactaaagaacagaatatcaaattagataataaagtaagagaattaaccagaaaactgaaggaaatggaagaacaaaacattaaattagaagctgatttagaaaaaatcgatattgtcgaaccaaaatttaatgatacagcctcaataatgtctggtatttcaagacagatcaataatcgtgctacttttaatggaaaatggtcgcccacaagttctattattggaattccagaagaaagcaaaagtgaagtggttccaagtggtaatattaataatattttaccaatcattaccaaacaaagagatcgattccgtacaaaaaatactgaattagaaaaacaattaagacaatacaatcatgaaaaaaccaacctaaagaatgaaataatgaaactaaaatcagataatgctaagttatatgaaagagtccgttatttgtcgagttatgcagcaacacataacaataggggttcatcagatccagtgttgaagaaatctcaaaatatagacaccgaggcacaatattctaacacatatgaagaatctttgcatcctttagcctctttcagaaagaaggagcttgattattatagaagagaaagactttctatgctagagaagttattcattagctttgctaatattatattacaaaataaaactactagaatgatatttatgttttactgtattgggttacatggattagtctttatgatgagtatgtatgttattaatattagtggctatttgactccagaagttggtattgttcattctgcaacaacctctgtaaatacacacaatgcagctataaatgttggtaagggaagcatttaaatgatcgaatatatatgcaaaatatagatacatgttcaatatcatgcaattatttattaataaaattgtatatcaaaaaaaaaacagaaaagatgtcaataataccatctatcttattatatttttttaaacggcatatttactgagattgtttagaagcatatactaaagaaattttttttttgttgtcatcttttcaaaactttataatttcttacgcttttttcttcgttcttaagtttatttatcctaacaacatatgtttaaagtactgcatgaattaacttaaacacatggtcagcaatagttaaatttgaaaatgccaataaatgatattcattattctcgtcttgtatcactattccagtcttttttagcctatgaatatttgaaatgtgacaagtaaaccttttaactgtaccacttgaagcaacaaattcaaatgtagcaccaactcgaaagttagcgttaatatactgtatattttgagaatatattgtagtgtttcctatgtcaagtagtttccaaaacttgccattttctagactgtgatattttgttctaacgttagatagtagtagatgtaactggatcttagtgcttgtaaccttcgtattcagagaattggaatacgaactatcatttgtcccaaatttgtccaaagaaatagatgaaaaagatgaagaagatttataggaaaatatagaagatgttaaattagaagaagcctttgtagatagcgtttcttctgtaaccgaacttggcagttggttcttaaaattattcctaatactttttgataaaatatttaatagtgtttcagtattatgatatctggctgttaacaacaatgtatctatatcatgagggaatgaatgtctaataacttctttactactaaattttagttgaacatctcgtgcagttgtctgcatcacttttactttactagaaactttagaaacaagataacatttattatgatcttctcctttatatgcgcacataattgttgaaccattgcgcaaacgtaaaatctgaagtgtaacacttttatcaccaatatttttccaacaattatctttagtccaatatgataagtttatcagctggtcatgaaataaatttaaactattaactagatcatcttgctccaagccagatacatatgtttttttaaccaattcttgtgtactgtttttgatctcgccaaacataaatgaagattgtgaaaatgactttgaaaaataaggtccagtatgttgaggttgttctttatccgattttttcttagaactaaagatacttaataatgaacttgatcttcgttttaatagtcttggttcatagtctaatatatttgaataaaatatactagaactatcaaacatatcagtattgtcttcatcattatcgttgtcgtcaagatgagcatcctctatctcggaaataatactgtatatttcatgtgtatcactctcagtcgatattctagggtctacttgttcaatagtacatatatctgacacagatcttattatttgttttgataacggggcctgttgaggtgctggagataattcaatagggatactattgtttaattccattaatttttcatagcttaaatgttctatttctgtcatagatttctctttaatgcaaggttgatttaaatcaatcaaactattaacgtgatacgtttgtgagttaagatccaagtttttattatattctatataattttgattgttttgctcaaatgaattaacatcaaggatgtttgagaatagctctgacctcaatgatttctttctttgtgatggtttttctcttctatcttcaaaatattgttcgaactttttcttccatatggtcttccattccaataaattttctgaatttatagataactgaacattgttaccgatcagcgtttccattttcaatccagtattagtatattctaaaatctttatatcatttggctttaacggcacaaataataaccatttattgaagtttaatagttgaaatctacccgtacgtaattcttttaataaattatgtgcagtgcatttcataggtgtaattgaaagatgtgactcgattttaaaaaacgctaattcattggtattaagttctacaatttccactaacatctttttgagtcctaatttctgagagtttaatttaactaagtgagtttggacaatattttttgattcaatatcaggatattggattttatttgacgagtaagatagaatgtcaattactttaccacctttatatgaattagagtaagcttttctaaattcttgatgaaactcattctcaaaattttttactgcttgattcaatttttgtacttcggtaacgttttgaagtgaaatttttaaatgtgaatatattgaaataaatagtttaataaaatcagattcttctagtgacctaaatgttgaatttgtggaattaaaaattaatcttataccattttgaaaaaaagtttcataaggaactaaaaaatcagcgtcattatatatagctatattactattatccaaaacattatttgctaatgtagaataaagggtgcaatgtttatcatataaagtttgcaacgtctgtataagcgattttaatttgatactgatcttgtagataggatcaaaactagacttagggtccaatggaaaagacttgcataaagaatgtaatttacttattgtccctatattatttctttcattaagaagaatatcttccatgatgtcatatatattaggcaaaagtgagtaactattttgttgaaacttctaaatatagttgttgatatattttaaaaaatactatagctactaaaaatagaatagtatcatatatactaataattgattattatttagtatttcttttatttcgaaagatagcctctttttaccctattcctgaaaactatcctttctcttcgttttccgttaactgcacgttacgcgtaaaaaaaaaaagattcgagatctcaaaaaatgcaaattattcgtggttctttagcacggttttattttctcgaggaaatccttcatagtaattcgatcctcaagaagtcaattgtagaggataataatagtgataatgactggccttactttttcttcgtgcaagtatctataacaaagaccaacaacaggtttttccaacgggaagaaattgttgactgaacgactattttcaacctttacaagaaactgtcttctctcatcttatggcaaggattaatctgataacacttttatgataatatgttgcaatattgtttgtattagagtcttctaaaaatattattcttgaaataatgttcaatacagtagaaagaaattaaatgacaaacggaaataatcactggtatcgattacttttacgtaatatattgttaaagctaattgcagctacatttaaatagtagctatcaattcaagatggaaaaagggtcatgatagaaaataatattatagatctacgctttaataatccgttttctttcattctttgattaggagttataaacaaaatatgtagaaaagaaaaaaaaaaaataaaaatacaaaaaccaataattatcaaaactatattaacaaggcctacagatatacaatcgattattctctaatattactttggtgataatgccttgatttcatactggatacttcattaattgaaaattccatatttgtgatgtcgcgagactgaccagcaaaaatattttcttctccaaagactgtattttcaaaatcgtttccctctgcaatatcactgtcatcttcctcctcgtcttcttgtaatatatcattagcatctatatatgcaagttgtttcgtcttattattttcttttatttgcaagtttctgataattacagatacaattccactacatgttgcagttgcaattaaagcgtaacaacccctttcaaactggggaaccatagacgcagcgtaaaaaagtaatgaccaccaggcattgacagcacctgaaaacatgttcatagaagctaatacaacagcacgttcttgaatatcatcatgacaaacgatgttagcccagggaaagaagactgcttggcctgcatatgaaacaccaccaagatattgtgctgtaaacataactccaggtgacagtggagcaattctaatcataatagctaccacacacataataattgcgataatgacacctatatgccaatgtcttgctcttttaattttgcttaagtatatagcagataatattgtggatactacacctacggcatagatacctgaaggatcattatttcggtgagatagagaatagccttggtgctgtagccatagagcaaaagtagcattggatgcaaaactgatattttcaccaccaaggatccataccaacgaaaataaccaccaatgccaacgttttaccactcttgcaataaccgaccaatctaacttagtagattcatctcgaactggcaatcttcttcttgcataatgtaactcttcctcattgaaaatataatggcacatagaaaacttattcttattttctgtagcttctggaacaccagggaaaaataaaaatccatatattgcaattggcacagtgatacaacaatcaataataaacaaccatctccaccctgctaaaccatttctgccattaagacggctatgtataccaacttgcatgaatccactaaacatagacccaatgagcccactactagtgaagattgcacttctaataggtaattcattttctttataccacatccccaaaattaaatgggtgccagaaaatgtacaactttcaaaaattgcttgaaagaatctgattacacaacattgattgacagaagtaactttatgcatagctaaggttaacaatccccatgacaaagtgcaaaaacttaaccaaactctgggaggaatcaccaacaatataagattatgagggatcatacctatgatgtaacctattgtaaagcacgttgctgtgatgtttaggtcatcaccagtcatatttaaatcctgtttcataccagaaacataagcattattaaatccaacacgatcaacataattgatccaatattgtaaacaaacaaatgataatacaaataaatcgattttgaataataaccgccttttattaataggatttttagaagagatgatctctttattatttatgatgaattccgtgttcttcataatggaaggttacaaagagatacttgtctgggtcacactgtattcataaccaatgtgtttaggaatatgtgtatgagtatatcaatgaatatatgtatatatatgtatactatttttacctactgctaccggaatctataatacgattgtactattccgtatttaaaataagctgcgccgcatttaaacattcgttatagtccagtattattattttttttcccgctctgtatatattggaattgttgtcaatccgataggatatcgcaaattgcaataataatatttgaaggaattggctaaaaacattagaaacaacaagaagaagaatagtgttttacgatcctgtataacgattggagactattaaatacaaaataaaaataatctcacatataatattataatccaacctttctaacatatactgaatgatagaatgccaagaatacgactaagagtaataagttaatatatatacatcaataattagtattatttaaattcttcttctttatcagttcttagaatttaacttgaggtaaaattaaaggaaaaaaaaagaaaatcaaacataacagctaataatacagggtcaattttaaagatttatgataataataatataattttttcatagcacaatatatatatatataaagaagagggaattaaaaagtaattaaaaagtaattaaaaagtaacaaattagctaaggtaaaattggtagaggaataacgatggagattaaaaaaaattaacaaaatctaatatcaatatttaattgagtgagtgtctttgaatttcatatttttttattcatggttttctgtattatgagcttcctcagatcttggattcttcaataaattgaattccttttgaatcaaacttaaagaggttctcttggaaccatcttctctttcagtaatataattagcagcatctgcttccacatatactaaggcactatatcaaaaataaaaacacaataaaaacacacattcacacacccagacacatttataccataggtattaaatgagaaataaaaaacaaaacaaggacgatacgcgggagtgataaattaatgttaaataaagaaaaaaaaacgttagtaaaatagttcaccagtagataaaaaaaattaaatatatataaaattgtaatctcttctttcttctttattatactttaacatacccttttttaacatattgagttaaaaaattaatatggttttcattaaaaacagtaatattataccaattggtaggcccatctcttcttggctgagaagcaatactgtatctaacatatcttttgtcattggaagaggtgtattctgtaaattcagtccctatacggccaatgatagtcattttggagaaatctaaatttctagcagaagaactaaatgaacgtaattgcgaacgtaaaaatatttgtttcatcattttatttttattattgccgttaatttattactaatattgttatatttgtattcacaaaagattaatgttgacaattataaaattattagataatagtagtttgcaaatatatacaatactgactactgtgcttatattaagtttctgtattaagtatcacgatgccctttggctatactgtttactttctcttattcgattttctttctcggttttttgtacttttttcatttttctgcgtttttttttatttttcatacagtgtgatttttcataaataatgaaacattaaaatatattaaactgtgtgatattagagtttactatgaaacgcgctgaataaaataaggaaagaaacttggaaataaggatataactgtttcaagcattaagataatcactttgttttaattttatccaagtaaatatttcagtctttctaaagtgaattcgttcccgatttattttttttttgtaaaatactctaaacataagttttattaatgattacaaattatataatgtctaaaatgtatttaatctacatctgatcaattattctatctatagttttttatttttttaattatttatttttttttctttttgattcatgatcattgttccgtttttataggatttgtttccaaaaaagtaatatgatcatcgatatatttacaaatatttcgtttctctgtttcagcagaatgtccattatttttacctgctgcttcatactccatatctaagaatgggaacttgaacgtttctgtatcacaaaagatttccttaatttgtttgaaattaattaattcaaattctggaaaattacgaaataaatgtgtattactaaagcctcttacatgcttaccttcagtatccaaaaaggctttgttgtagtataaagtaaaggggttaaacttgaaaaaacttgcatgaacaaataatacatcacaacgatcattaccatatttgtttgtcttaaaaaatttatctacaaaagatttttcaacatgataatcaggatcatatttaaagtctgataaatgactcatttgtatctgttccttagctaactgatataattcgtagtcttgtgcataatcatgctgcagtaaacccacacctttaaatccatcagagatgtagctactgaatgtgataggagtcttgacttgataataaggtttgtgaagcgaaaaagctgcaccaataaatgtctctttatcaccttcaccgcttccatgttcactaaataatgtataataccatgaaggtccatagatgttatagtatagagctagtaataaagtatcaaaatgatcgactttattaataagaagttgtccagattcagatgacaaatctggtaaagtcccttctaaatcatgaaatggaatatgttctttgatatactcaagggaattttcttccgggttgatatactgggatggtggagttaaatcatctaaggaaaatctgactctttgagtcaggttatactcaaggcctgcaatatcataccaatccggtgatgtttgtcttctccaaagatccggccaaaggattaaaccagtctctttatatatatacttatcaaaaatatcatcaatgttagtcaaagcataattatctgaatctaagaatagaatatttttaaaatccgataataataaagctaataatttgtattgataccctgagatatttaattcttgtacaatttcatccgataaaaacttcgacatataaacacatgttgcattatattgtggaacaaaattttcacaaaaatctttatcatacttttcatcagacattggaataaaaatttcaacaggtaatgtattcccactcattcttagaattggtaacatagtcactaagataatggagtatttaccaccaccgaccgtgactatacctttatctttattaaaaagagtctcaggcatgtgctttggaatctctttgattgttttaacaaaattttgatgcattacttttaaattctgcttatactccggtgttagattaaaacatgcgcttaatgaattataagacaatgtctccaaaccttcttcatcatttactgtatgttcaccctttttgcacttctcttgattgataaaaagtgattcatcttgtggtagttcaacaggtttaaattctgataagatagaaaacaattttcgattgaattcagataaatttgaaacattgtttgagttattgtctatttgatgggcgatccattccttagacgttttcgtgtagtcaataaatattgtattttgtgttaaattagacttattgaattggtatagaagagtgataagaaaaatagatattaatacaatttgtaaaaaacgtttattaattaatctttttaatctccagagggcaatattcaaattgaccaccatcctttgatgtggagtgggtttatcattacctttctactaaaaaaatcggttttatagaaaagttagaatatgaaccgataaaagacgtggatcaagaaagttggtgtcccaaaaaatgacttaatacagccagtatcaactatattctttatacatgataaattttggttcagactcacttcaaatatcttgcaaaacaaagatcataaaaaaaatttaaagtttttcgttataaacaatataggagatgttataaatttcaaaatgtttacttctaaacaatataaaaaaaaaaattaaaataaaaaatataaaacaatagaaatcaaaaagatcagcaatggctaaatgttattgtgtgtataagaaagaaacaatcaagtggtatagacttgaatagtttgaatacgaaaaagaataaaatgaaaacactaagaatagatatgatgagatacgtgtatgtggaaagacataaatatagaagataagatcaaatcaatgttatacagtatggtagtattataataatatatagtgttaactggtccgtcatctaccttatcatttgatataagtgtttcctcctatctcttgtcttataaacaataaaataaattaatttggtacacagacacacaaacacttgtgtcttatacataaaaaaataaactaaataaaataatgcttttcttcctcaatggagaattttatatatttaataataagagatacacattttatacaaaccagtcaaatacgattatacaatataagagattaataaaacatcactatattaatagtaaagaattggttcgattagatgttcaacttggttcttctccagtttcttctcttggcgttgtaacgaacagtgttgttagttcttaatctgatccattgtggcaatggtctgttttgcttcttagccttagctaacttcttcttgataatgaaagatttttgagcctgtaaaaaaaaaaacaacaacaacaaaaataatagataaaagggatatcaaaagtgtcaatatatcatcatattaatgataacaatttgtagatacaatttcaatcgacattaagaataccaaaataaaagagatgtatgttagtattaggtccttgagtaatatcttttgattcgtatagttattttctcttggcattagtaagaagaactgttatgtcgcttttcctcagagtcttggtgacggtatctaaataaagaaccacttcctaatttctactacatacagaataactgttttttcttccatcttgcaaaaaacgtttcaactaagtattttatctcatatgcatttaactctatactctctatgatttacagatataaataaataataacgaaaaaagatatctcgttcagttcttgacattattaggcaaatattataaaacagctatgagtctatatgatattcctacccttcatttcgttcatctttccctagtttgtaaagcaaagcatacagatatacgaaaataaagaaaataactggataatgtcctatcatgtacatacagccatcgttgtatcttttgtgtatggttctcttccgcctttgagcttacaagcggtgaaatatagtacgttgaattttttaaaactactttcacatatgaattcccattatagcgaaggagttttcaagcctattacaagttaccaacgtattgctagaaggagggtgtatactgtattccctcaattcaagagattaagactatctaggtagttagttacacatagattaaagtgaatcgctccctcctacgggttcccctgtctctcccttccttgctgaagccactaaccctattagtgcagattctccttccttcactttgcactggaaagtagaaaaggttacgaaattacaagtcccgtgtaataaactcaaggaaagattgataatgcgtttgctggtagaacaggtattttaccactaccaccatcacagcagttgaacaggaaaaaaaaaaaatagtgccatatgtggcatttcgtcctatgacccctcggtccctctaagttgaagcctcactgcttacaagaacctcgctattcagacacaaaccgtttttattttttctaaaaaaaaatgaatgcgtttttcaaaaagagaaacacaacaattccaaaaagtatttcctaaattggaaatctttaaatttataacctttttctaaaaaacacaatctccgcgcattacacattttaaagtgacatcctttgcttccataataaatggacatagagatagtcctggataatttattgattgttatggaaataattgaatattgaaaaggctgtgctatatgacgtttcaaggtttataataaaagcggttgacttagaagaagagccctgcttccattgaaacacacatatacacacatacatatatatgcctgtaccatcaattactttgaaacaaatgagaagaaatgtgtctatgaagatagaaaatatatcgaagaactttaaagcctcagtgagaaaaaaaaaataaaaaaagggaaagagaaagaaagaaactgtatagacattactaaaagtgaaacgtcagaacttttcggtaacattctataatttaattctagcattatagcagaggatgtaagttatgtcatcgttaataaatggacgtgtaaatgtattgaaaaatatacttaatctagaaactatttctgataataaaaatagatcagctatagatgttttatttattgaattgttaacaaaatatgataaaatatgtaattctggttctattaaagagtatgtggaagtatggatagcaaaatattttgatatattttatgagacagacaattttataatgtcagattttaataattggcgagttctgtttgattctttaaaattaattgacggtgttcatataaaaaataacattgaagatattcttataagtcaattcattttgtcattttgtgaaataagtgttattaaccttcaaaaattagctgcttctactgaacttagaactaccttacaaaaatgtatttttgattctggatttgttggtgatagtgtggactctgtacctataccgatcaagaatttgataaaactatatagcatgctcctctctgttacttgttccaccagagatattatggatattgtttatttattaccttctaatttggcatttatgatttttgataatatatgtgatcatttcaataatttatcacttgtaaatcagataatttttgaaaattattatcatcatatgaaatttgagatagaggcggagcttcaaaagaaagatatgacaattcagttatgggtcgaattgaatgatacaacacatcagagaatattaacattaggtacagatctaattattgaaattcaccatggtaatctttgtctttgcaaccaagagtttattcttggtctctttgataattttgagtttgaatcacatcttttataccaaatatctttatcctatatctgcagtacgggcgagtggatactatatgttaacgatgaactaaaacagtgttttaccatatattgcagtgaaagacccaaaataacttatgttgaaataggttcttttatttgttcgttgaagttatattcattgaatatatggtcccttgaaatgtctatagatatggtaaaggtaatgtatacattgggtcccacttataaacctcaaattagttctaatgattattactggggtctcctgagaaatttcccagaaggttatttggaagcactatattatatgacagaatctacgtgtcttgtatttaaagagtttcaacaacatcttaaaaacttaactttgcaaaaccttgctcttcattatgatttagaagatactattcaaaagtttagaaaagatagttgtcaatttcaactgaatttcaattacgggcatgaatcaagttcaaataaatgttattttttgtatacagaaaatattcagtcaaagctaattactataaacatttttaatattattatctatcaaatgcagtcggccacatctccagacattatattccaatacacttcgctaatctttgatctttgcaatgatccaacacttttattatttttccaaaagtcggtgggatttgatcttttggctcatatactttatcaagtatatgttaagaattatcaaagaggattgtcctttgaattccttaacttatttttgcaattttgcggatggaatactgagaatatgaagatatctatgttaaagaattcaaatgcttataaacatttgattattaattttgatctgtggatctatccacacacggttcagaataataaaaagattgaattagttaggtatatatttttccatttatcaatgcttcaagaaattaacaaatatcgcgaatacaatggtattgaactaaagaaaatagatgccttcaccacaatttgctgttatttatatggtaatgaaaatgaaatatttaagaagcttactgattcaataatatccactctgtatattttgattattaatgattctagtcgagtgaattataatcttatctggcagataattatagtatctttagaaaatgacaagttatacaatattcaactgtttattgatgtcttaaatcaggttctaaactatatggagaccattaaggattacaagtttttcaatttacattctgctaatttgttgctatatttaacaagtcttatgagtcagaaacttttgggaattactgtacttataaaattactatttcagcatttttctatcaatgaacagctctataaaaaatttttgatacaagatggaatcaaattattattcagtattctaactcaatgccaaattgattgcctgtttgatatattgccaataataattaattttagtactaacagggatatctgtaactcattagacattgaaaatattcatgattttcaattttgtaattttgaaagtcgtttgccttttgtgtgtttaagtatagatattgtagaatggatggtcaacaatttttcacaaataacatctgagaaaaatcttcaaaaacttcttagtatatttgttcaggaaatagttaacaccagtaatgattttaaaaatataattattaataatttaaacttattatcacatctgtcaaatttgttatttacactacataatatggataattctgaaacttatcaaggtatatccaaaattttagctaactttctttcaaatataattatagaggttataaaagttaaacaaaatgcaggtatacaattgagtaatctatatggttatgagtcatattttgatgataattatttaaaaacttatcacatagaaaattgtaattatgttgatttaatatttgttgaaactattttacctgatattttgatcaagctactggacaatgagtcaactttgatatctgaactaaaacagaacacactgatgattaaaaatatatttgatttgttaaatgaattaaaagattactttgctttaatgacgtataatacctctactttaagacaggtctacgaacttttattcatttgtggggaagttgtcttatcaatgactccaacattttcacgcctcttttccaaatattatatgttattatctaatttttcaaaagattattgtaggatggtacttaataatgatatcaataattggattagttctgattgtgaagaatttgattcagctttggtaaaatatcagtcatcaatatacagtctcaactcacacaagaatattcatgatgtaacacaatacctgttatttacattaatgtatcgcctttgtttgggaaaaacttcaagaatgttgataccagcaatcagagccctggtgatgtttaattatgaaaaccttgaggacctcatcgttgaaccttatcaaaattgtgagtctttgaggatttatatgaaacaatttttatcatcaaatgatgaagtgattttaggtagcgtaaacactataactgattcaattttaaatggttgtacaatatccttctatcaaaagaaagttaataaatgtgcaaatagatggctatatgcaaaaccgattattaaagataatttaaatgaaattatatttgaaagaaaatatcgttatgcaaacttcaataggttagagggtgaaaaattaaatatatctttgtctgaatgtgttagaagaaagacaaagattattaatgatatcatagtgaaaaaaattaacagttatttaataaaaatacaagagcatgagaaaaatcaagaatataaaaaaatccagataaattctgaaataagacatcttcatgatgtaaagaataaaaaaatatcaaataatttgacaatcagtaatgaagaaaattcagaaagaatgagaaacaagattgttccttggtagattaataatttatctatatatcttcaattccagaaggaaaaaactgtgaggataataaacgattatacaaaatatttaatgacagtaactctttataacataatataaatatgtaatttgtgttatagtgatatgtaaataaataaaaacacaaccaaaataaataagatgttaataagtaaaaaaaaaaaggaaaggtagagaaatcttatttagaggtggtggcttcaaaatgtgtttcagataagaatttaattcttttctcaatataattacagactgtttccttagtagtctctggattctcaaaacttttaagtatgtaaacaaatctgttatccatatcacatacaacctctttcaatttctgattgacattcaattccaaatcgaaatatctaagaggtttcaaatcagaaatacttctaagttgttcaccattttttagtatgaatctgtgatcctttgataattctacagggtctagtttagggaaattgaaatggacaaacataacatccggttcatcgtaggtgaaataagtttcatagaaatgttttaaaacattatggctttgattagtaaaagtgtgcgtttcgaaattcttatatttatcattcaattcttttctagccattagatagttttggaaatctattctgaaatcttcttgtaacatacaaacaccatggaatccatcatgatggtaaccaccgattgcaggtttccttctagtttgataatatggtaattcaaacacagtagcagcagaaataaaagtttctttatcaccttcaccagggccaccctgtgtaaaaattggatagtaccaatttggaccatttaaattataataaagcgatagagctatggttttccaatgaattgatttatttattaaaaattgaccggattctgtggaaagatcgggaattgtaccttccagatcatggaatggaacgtttttcatatcattcaaattttcagtgtaaacttctactggggtaagatcgtcaatcaaatttctaactcttttatctctattatatttgatcttggctatatcataatatcttggtgagtctgttcttctccagaaatcgggccaaagaatcataccattagctttatatgcgatatcatcgaagatagaatctaaatttttaattgggaaattatcagcatctaagaataaaatatctttaaattttgaggataataaagccaatgatttatactgataccctttaaaatgaacattctggatagtagcttcattgaagatatcttcgacttgcgtacattttgcatttaatttaggtaaataattttggcagaaactaggatcattttcaccaggtgggataaagatttcaacgggcaaagttgtgttaaaatatcttaaaacttcgatattcattgcagctaataaagaatatttcccaccaccaacaataacgatccccttaccgcctatagcattattaggtagagttatttgattgataaagtcagtgaccatagagtgtttgttacgtaacatagtaatttggtaatcagttaacatcaggcattcagacaaattgtcataggtagctttgaaccagttcttgtaatcatcaccacttggatcaccacctaaagcgccttccaacttacaattactgttatagtttttgccacattctccctctggtgacagttctattaaagtctccattaaagaactgtagaattgttttaaatttagatcagataaatcatttggttcaggcagctcacttgatttaggcaaatcatttaatacaggtaaatcacttgatatagtcgagtcaaatgattctatccaatgttgtggattgattatattattgtaattatatgatgacgatggtgatgatgatgatgatgaaatattagggagtgaaaaaaatagatataataagattgttataaaaattattggaataataagaaatttagatttcctttggaataaccttaagaaatttctcaataaaaatgtcggcatctgtatagcaaaaatcaaataaatagacggataatgataaatatatcaatatattaacatatatatatttaggtgttattattgtatggataactgtgtggatttgggtagtgtgtaatagcagattgagttatatagtatctaagatatttgaattgaggaagatatagtaatgtgtttatcatatattaataagcttttatcattaaattgttgcaatttgttatgtttattatgtctgtgttgcaaacgataaaatcaagagatgcaaaatgataaatactactttcgcgttttttttttgtctctctcggaaagcaaaaaagattgaaaggttctgtggttcgatttataatcaacgcacaattgtattttctgtgttctaatgctttgttgtcgttagtttagtatttatatatacatctagtgatgtaacgttaaaatggaattctaactcgttatatgtgttgtacaattctatattgttgttaagcatcaccagaggaaagtatttcaaagaaatatataatgttggcaattaaaaaaaaaaaaaaaaaaaagataaataatgaggaaatccttggagatggatttttgtagattattatatctcaatgaacggcataattgttattaatacatccattagtttgtaatacacttaaaattatttatttatttatttatttatttatttttaatatttttgtatcattttaataattacacctaggaacagatattgtggaatgataaacgataaatatttataagtaacacactttctctatacatataataaataaaagaacttaatatgaagttataaaaaaacaatcaaaattctaaagaactgcaagaatagacataacttcttcccaaacaaagtttagcactgtaacaattttatacaactacaaacgatgtcaaacattgatcttattatataaaattatctctcaaaatatgtgtaacttatctttatcttatcaattatatattttccagagtctctgtataaatcttctcaacagatcttcccctaattgatgcccttagatgatctgacgaaataaacaaaaaaaagagcaagaaaaaaaaaataaatcagtctatttgcaaataaaatatttcttaatctgcccttcatttgttcataactcacacatcttgattgctaaaacaacactgttgaactattaaataacaccaatttgatacatctataaatacttttctcttgattaatgtgataatgcatttcgttgtcaatgatattctacattaattgaaaaatagaaaacctttccaactgcaaataactaaaataatactctttgttgatagaaggaatgactgaatgaacagattatttccatatgtcgatccttctagcaaggtattcccttccctgctgcctaaacacgaattctactctattaaatatatgatgcttttacctccatgttatgtgcctttttacacttagtatagtattaaaactgtagacagtgataaacaatgcatttgaaattaattattattccaaatatctcctgtcccttgtatttgcatgccttaatgatttcatagcattatgtccccaaatacaacctctattccaactcctactaatgataaagattcaaatagagttgatagtgatataccatatagtaaagctgacgactatactatgtctgaaaccgaatcgttgaaattagatttactaaatgaaaattcaagggttcgatatctgatagatggaaatgatacaatcaaacatatatgtaattgttcaatgattgtaaatttaaatatcattgaaggaattttagttattggtaagattaaattatatttcatacctaatttttactatgattcatctaaaaagattattttgagtatagatctagtatctaaaaaattaagagaccctgttaatcttgacttatccggaaagttatctgattatgaatcacacaaaactacaaatttttcagattctatttatagttggtatgtaaataacattgctgagctttttaaaaaaccttttctattacgagatgttgcgttagaggttacgttcaccaataaatgtagttattttttcaatttcaataataaatccctcagaaattcaatttatcacattttaaacagtaacaacaaatacaatcaccaagataataataataataataaaaatagactttctaacctcttatcaagtattcacataactgcaggtgatcatcttacaattacacaactatggaagaacggtaaaatttcaaatttttattatttgatgactttaaatagtttagctggaagatcattcaacgatatcacacagtatcctatctttccctgggtaatagcagattatacaagtgaggtattaaatttaaatgaccctaaatcgtttcgtgatctatctaaacctatgggtgcacaggatcaagaaagattaaggaagattgtagaaagatatgaaaccatgaaacaattaaataataataataataatgaaatgaaaccattccattacggcacacattattcctcagcaatgattgtctcctcatatttaatgagggtcaacccattcactgattcttttcttttattacaagatgggaaatttggccatgccgatagattattcaattcaattgaaagaacttggtcctctgctgctattgagaatatcacagacgtgagagaattaatacctgaatttttctatttgcccgaatttcttataaatatcaatgattataaacttggtaaagatcaaaatggaaacattataaacaatgttgcattaccttactgggcaaataatgatccaaagatctttatacaaaagaatagagatgcattagagagtaaatatgtatctgaacatttgaatgaatggatagatttaatatttgggtacaaacagagaggccaggatgcaataaattccttcaatgtttttaatcaattaagttatcaaggagcagtcaatttagatcatattacggatgaaaatgaaaaacaaatagcaactatgattatatataattttggtcaaatcccattacaattatttaagaagaaacatccgaaaagaatatgtgaagagaatcaaaattgttcaatatcattatcaaaattctttaatgaaaattttgttctaacagaaactcgacaggccacacctgataagatctgttatattaaatgtatgttagatgacaatggtgattacaattggtatgggtatccattcttcaatatggaatgtgtcgagcctactattggactggttaagatgaaactaacttcaaatgatactcttaatattaatggtcatattttccaaaatttacataattgcaagattacagttttaaagagatggaaagataccaaatttctcactggggattctaatggattaattaagttgtgggaatataagaaggaaaacaatgcaattatacttgatgaaataagtatgctctttggacatctagatacgattatagatattgaatcatatttggacactaatgtcttgatcacattagataagtctggctatgtttatagttgggatatgaaaacgtataaacttatcaggtgttttacaaataaggggaaatttataactgtgtctccacaatcaggaaatgttgcagttattacatcggataacttcttgaaaatattcaccttcaatgggttattctatttggagatccaattgcatgaatatatcaatgatattgttacattaaagtcactagaattttttacaaccatgaaacatcaatacgtgaaagatatggattactacattatcggttattccagtggttgtatgtcaatccatcagttatatttgaatgagaaatcatgggaggttaaaaatataataccaactctagatggtaatactactatttctactaccaatattgctacacataatgatattagtagcaacaataataatactaatgcatcttgtatttctaaattatcatgtctcagagctgtttttttttttatcagaaaaacaagagaaactacaaatcgtcatgggttatgaaaatggacaattagaaacgtatatgcccaagatgaaataatacagtgaccaaacaacaaatttagaaggtcaatacactagatatccatcccagttcatctatatatctatttatgtatttctctatatgtaggttatatttttcacatgtttgatctcactgaagtttctgtttagggctcatcttcgggtttctccgagtcatttttctgttaccaaaaacggaaaaaaaaagaaacaaaaaaaaataaaaattaaactaaaaatttctgaaaaaaaagcaactcccctaatttggattactatatcgttttccacgatctcacatatgtacaaaaacccaaaaaaattgaaaaaattaaaaattagaaagtaaaattattgaaatactacaaaaagaaaaaaaaactaaaaaaaaaaaaattaaagaaaaataaaaatacaagaaatgattgaagtagagaaattacaacttgtttttctctttttctttcttccattcttatttatctgtttgctcaaaccttttttgttgaaaggagaacaaattattctcacggacattctttctccttttgtacttctctttctgcataactatttacctccaatgctaataaactaaaagtgtactatacctatttttcattttatcaagaaattatttatttatatcattctgtgtatacattacccaatcaacatattttctgttttatttcaatcatatttcgacaagccattcaatttaagttttcttaaatctatatagacccacactctagaatagaacaaaacaaatactgtaatattatagaattaatttccttttcttttttcttttctataatttaataaagatattaaacttaagctgaacaaggagtacgggcacgttcaaataaataaacaaataattaaataaaataaccatttcaaccaaaaaatgggatacccgcctccaccccgtcacatgagtgacaaaaaaaggtattattataatagtaatcctaatagaagatatgctcatccatatgtaaataacaaatattctaaaccattcaataactcaaacacaatcaataataattccctttattctaaagaggaacatctaccgaattcaagtacatcgataggatattctggaagcaatatacctgcgccaaatctaacacgaaagttgtcttctcaaaaattggattctcctcaacctacttcattcaaaactgaacgtcctaggcaatctagatatagtggagcaataaaaacaacaacaacaaccccactcgttcaaaattcctctaatgtaaacacaagaacacctatttcacgttataatgctgattcagaaccatctacacatggaagagagttttcattacattatagaaacaacaatagtaacaacaataataacaacaataataatactaatagtgtcactaatagcaaacaacaccattattcctcatataatgaaacagatttgaaattttctacacctggtaaatctcgttttgaaagaaataaatattcatcagctacttctttgttcacttataataataataataacagtagtagtaatgctaatagtggcaatactactagtaataatgtttctataaaaaattcttctataatgagtcctatagcagtatctagtcgatataacaactcagtctattcaacgcctaatacttcatcgtatcatgcatatccatctacttcagctaataattacataggtagtaggtatcgtccaagatcagctggatcttcagtaaatagtataccattagcttcaagagacttttattctactactaataatactactagtagcagtggtcctacaaccacaacaacccctactaataattatactaaagacgagtttcctcgtaatattccaaaatataataaagattcttcctcaattcatgataataaaaataccccaaattgtctcaatgaacccagtactcaatggcacggtactagaactataaatggaacaatgtatcattcaaaatattttcatgaagatatatttactgcaaagagcaatataagtcaaagaggaagtgaaaaattaggtttagaaagggacacaaactctgctactccacctttaagtagatataatccaaatgtggatttgtcggaagtatctaaaagtaaagaaaatcaaaaaacagagtcattaaagcaagaaaagtctaagtctgaaacctttgatacaaacagaactattacaaatgattcaaagctcaaacaggaaagacgtaattctattaataagatcgaccctcctagtttaatccattcagtagctcaaactacaaaagaagtcgagaaacaactgtccatagatcataaaagaatcgatttatctagaagaaatagtgatttaaatatctcacatcaacattcatctaacacgacagagaatgaaatacaaacaaagaatatatctaacagtgtgaccgatttgactataaaaaatgaagaaacaaatgaaaggccccaattgaaaacaatgtggacatcatcagacttaaacttacctgctcttttgagtggacacacaaaagaagatcaggatgcatctataaatcaagaaagtgatcaagacatttcagaagaaaaaactgtccaaccaccatctgagactgattatgaatacgtttgcaattcccaattattaaagccttctcttaaaactttacaagattatatagaaacgaaagcacctctacctaaaccattaaaacctcttcaagagtgtattttccctatgaaagagactgaattgaaattatggacgttgaaaaaccaaactagatccaaaattatccaagaccaaaaatatttactaaagatgccaatttcaagtcttaaagaatatccctttataacatctaactatacacgatacttatcctcagttaaacccattttagtacaaatattattgactgtgaaaaagaaagaggtagttaaatcactaataataaagaagaaggcaaatgaattaaaaataaaatgggatgaagaaaacaaggaactttatgaaattagtgctgaattaagaaaaaaagagatagaatataagaaagctcaagaagaaaggaataaagaacatgaacaaaatgacaaatatgcaaaccaatcgactgaattgcctgatttatccgatatgtcttctaatcgtagaagaaacagagcagattttgttgatgatacagaaatggaaaatgtattacttcaaatagatccagagtataaacattttcaggcagctgcaattattcctcctctacatttaaatcatattaaaagaaatgttgtgcaatttcaaaacgtaaataatttagtgactgataaagataaatgggcttccagaatactttcagataaggatgataattttactgaacatgaacatatactgtttactgaaggttatttaatgtatcctaaaaaatttggtaaaatatctcattatatgggaggactaagaactccagaggaatgtgtgctacattattatagaacaaaaaagaatgtgaactataaagaactattgctacaaaaaagtaaaaaaagaaaggaaaatatcgccaaacgtcgtaagaagaaagagaaagagctcgaaactaggtcacctaaaattacttcatcatcaacttttaataaggagcaaaattgtattatacatggtagtgatgttgtatcagaggagactacaagtaattctgaacaacctctagaaagtccatcttcaaaagaagaaacgaaaatgaagacagaagaatctaaggatgacaaaacatctgttattgatagttctcagatttctgaagttaccaataatgtgaatgaacattctgcacaacaggataaagtattactaaatccaataccaatagataatgatgtttctgaacgtaaaaaatctcaaaataatgctgtaaaaaataaaccagaagatattggtgataaggatgtaattgcaattgcatcagctgctgtgaaaactattaaagaagttcctgcattagagaaatttgatactttggaagaaccagaagacacaactactgaaattacttcagttagtttagaaaataatgaatttcaaaatagaaataaaaagcgtacttattcaaattccatccttaacgaaaaatctattgactcaagagttgaacagattgaaggaaacactactcagatcatggaacacagaagtatttcaaacccaggtgtgtcaaaaaaaacagaagacaccgttagtctgaatacagcaagaaactcagacatttcaattaaatcaaatgaaaattttagcaaaaagaaacataagtatatgtcagatcataagactagttattggagtgtgagagaagctcaaatatttccagacttactaagaagatatggttctcaatggtcattaatatctgagaatttgaccacaaaatctaccacaatggttaagaattattatcagagaaatgctgcgcaaaatggatggaaaactattgtagaagaagcagattttagaaaagatagagaaaataataagtcattacaacaaactcaattcatgttgcaacaaaatactaccaataacagtaataattcaaacaacgttaataacagtcatcttccgatcatatccaatggtgtaccaactcaacagaaacctgctatgctattttttgataaacagagtaattctgcaccatcaattattccacctagaagatcttctgtattttccgagtataacaaggatatattctccaactctccactagacgagttaccaaagccaagattaccttcaatactctttcctaacaccaagccttgccttacaaatgaatctggttcaatggctaggaatgagggcataggctctttttactcacttaattcacaacaaaatacccatagttcacctcaagaaacaacgagcacaaatacaaccacgacaacccaattacctcgattatcctcttcagtttttgattttatgggtggtaacacagagaagcgagacgatgtcgttcttccaaagagatatactatgccaaatagtcaaatagccactacattagaacctagtctaggtaagaatatctctactctcaataatagcatattacatggtcaaagacatgacattgcatcaagagaaaacgatacaattttaactactgagtcaagacgcaattctattactgctttattgaaccctatatctcaacacacaaggcgttatggtacagggatcctatcttcttcttctgctaatgaaagtatgtcacgaactaccctaaataatacaaaaacacaacttccatcaattcaaaacaccactgcaagccatcataaccaatcaccaacaatcacactacagccaattagcaatctagtaggttccaatatatattctacacaacctactactactgttccatcactgcaaaatcaaatccctgactttgctaatgatccacttgcagctctagctgctgtggcatctgccccagagactcttgcttcaattttacctgaatataaggaaaaatgaaatacagaatttaattttgaaacgaactcatcacacacttcatttatcactacaatatattttagtgtgtgtttatatatatatatttcttattatttttgtaacttatataaataaaaaaatagatataagattatatattcaatacaatatgatacagtaatgatcatttcatatagagcaagtaacactttgagacgtatcataaagatgaattgtttcactatttttggagaacacaagtaatgtatgtgttagcacattctccatgcttgatgaaccagatttgtatacaacttaaacaaaaataaacaaaataaccaaacaaccaaccaagaagccctatatttacaaggaaagaaaatagtaaagccttagttttatgtatttcgtgtcacacgttgttctctttttttcttttgtttacagttttttgtattcttgtgtttctcgagcctttcggcctttgaaagatttacttggagattttttttgttttgtttttttgtttatttttttttcgtttcttttccttctcgtttcttttcttttcttttttttttttgataaatttctcgaggctcaaagaaaacaaatcgataaagatgacgttgaaaattgaaataaaaaaataaattattaatctactccttcattatttggtatatcagctgcaacccctttacaaactaactttgaattcctttccacaatttctaaactactaaatactactgccagttattttcctcttccctcttttaagtgttaccaaaaaaaaaagtcaaatcttcgatttgaagcagaataaaactagatatatacacaagtaaacagatacatatattcagctatttagatatagtggataaattgaaaaagaaatcttataatggaggttattattcaaaaatttgttgctcctgtgtttgaagcatacccacaattacatgactatgttcctactatagaacatccttttttcaatattaatctatgggataattttgataaaatttctacttgtttgaccagaggtaaatttattccaagtcaatttgaatttattcaagggcaactgcctttaagtgatttgcgtagtgtcacaatcgccattgctttatattatatcattatctttggtggtagagcactattaaagccttttcaaccatttaaacttaattgtcttttccaaattcataatttatatttaacttttatttcttttattattctaattttaatgattgaacaattagttccgatgattgccaaatatggtctttattacagtatttgtaatattggtgcatggacacaaccaatggttactttatactatatgaactatattgtaaagtatatcgaattcattgacacattctttttggttctaaagcataaaaaattgacctttttacatacatatcaccatggtgctactgccttattatgttacacacaattaattggtactacctctatctcatgggtagtaatatcgttgaatttaggcgttcatgtcattatgtattggtactatttcttagctgcaagaggtattagagtttggtggaaagaatgggttacaagatttcaaatcattcaatttattcttgatattggatttatctattttgcttgttaccaaaaagtagtccacaattttgcaccattcttaccacattgtggtgactgtgttggctctgcttcagctacttcatctgggttcttcattgtttcatcctatttagtactattcatcagtttttacatcaacgtttacaagcgtaaaggtaccaagactagtagggttattaaacgtgctcatggcggtgttgctgctaaagttaatgagtatgttaacgttgatttaagcgaagttccaactccatctccatctccagctagaagaagaaagtaattgacaacaaaagttatcgaaacacaactgtatcactaaaaaacattttgtatagatatatcaaataatttatatacctctacccgtatatatatgtatataaatcagtgtttctattgtacattagaaaatcttgaaatatgaactgctttagagacatttaatatcttcaaatgggtcccgtcttatcttaattttctttctttctttcttttaagttcaattttacttttgatttcactacattacttgtgtactattacagagttgcataaaatatctgtactattctattttatcgaagatagtatgtcaatgataatatgatattgaaatattgttatacacatacatatcactattttatttcatcctccaagtaacaggcccgtttttgagataattttaaaagttttttcaacatctcaggtgtgatctttgcatcaccgccaaatatactaacatgtttcagacctccctcagaattagatattacagatatagtcgaattcacactattttcttcagcttcagtgtcaagatcagcaagtagtacactttcaatagcatccatatcaatatcttcatcactgttttcttcagttattttagcttctggatccaaattaatgataccataatttgaagcatatgcaatattttcagaatgcagtctcaatgaatactgttggcatgggtctgataaaatttcatatgtctctctaatagtagcatttctaccctttgtccttatagtcatcttcagatcagtggcacgttcgtctacaaatgctcttggtaattgaacagattgcaatgcatacataagtgaattccagcatagatcaaacacaggtccagtacgactgaaaactttgattttagcatacaataaatatgaccattttttactaatttggaatacattatctggcagagttgaattatctgatgagtcaggatatataaccttagcatttccattattattatctgttattctaatgcctggttggactttcaaagcttcctttggtaatatcttggaatataacacgtaatcatataatctttgtgataaagccatctcctcatcagtacatgctcctgccctacctctttctacctctactacaggatatatagatgtgtaattagacagatccgtgcttttaatatcatccacaccaataagttcattttccatatttttatatactacggaatcctcaataataccaccagtgatagtagttacaacaaatgtatcaccacatttcaacacattagaaccaattatattgttatctttatgttccttaccatatctagatagaaaatcctcattcaattgaatttctctaaactcttcaaaccctttcacagatggacggaaacctaatgatagatgtttttgtaaagatagttctggggaaatacgagctaaaacttccggagtgaaactcactggatgaatatcaattgttttttcaaggtcattagacatctctaaatttttttttaatgttgtcctgtcttttggaaaataaaccagtttagtacaggatatatttatgagttcacatacttgtatatatccttgcatataattaaataaaaaacacatattgtcaagatagacccttcttgaatagctctaatggattgtctctaatatactctttctcattattctttatccaaaaattttccatatttctgaattttccaaaatagtctcaatattctccaaaaaggctgccattcctaattgggaaatttataatcagaacagtaaaatcttcaaattagtggaagtctatatgatcttcgcaacaaaaacctcgagaatttgaatgaataatagcgaatagatatcaaaccatctataaatcgagtagttgggccccattaataattgaaaaataagttgtaaaacttatatataagaatatttattaaggtaataatgttttatttttcgtaacactgaatcattcacgtaattgtcttagactgatcctaaaatctcaaaaaagcaaagacaagaacagaaaacaaaatcatattttattaaaaatgagtatatctatagttgggtcattaaattatgatttagttacctatgcagactcgattccagcgccaggagaaacaattcgtgcaaatagttttcaaacccatacagggggtaaagggttaaatcaagctatagcaattgcaaaattgaaaagacctgattcattctatgacgttcgtatgataggtactgttggaaaggatagttttgggtttgaattaatacatattttacaagaacatcatgtagatgtctcacaagtggtcatacatcctactgagaaaacaggtgttgccatcattctagtagaaaaaaagacaggtcaaaatagaatattaattactgcaggtgccaatggggaaagtgtatataatgacgatcagttagaagctatctttccaaaaactttgaaaaataataatgaggatagacatatggctgtatttcaacaagagataccagatccatgttctattatgaaatggttaaaaagggaaagaaaaaattatgatattgtgttcaacccatctcctttcaaaagtatagaaatagataattggaatctaatagacattttaatagtaaatgaagttgaatctttacaaattattgaatcagtgttagaaaacaatatagttgcggaaattaaaaaagaaataagagcaaattttatgaagggttatgaggagatatgtaaagtacttcaaaagaaatgtgtcaaccctaaaggccctggtattgttattattacattgggtgctaaaggtgttttatttttgtctaaagaacaacgagaagttaaatttagagaacctgttaagaatattaaggttattgacacaaccggtgcaggtgacacatttttaggtgcttttatcacccagtattatcaaagtatcgatattacaaaagcaattgaattcagtactaaagctagttctttgactatccaaaacccaggcgcttccgaaagtattgtaacgtataatgaagttattcagatctcttaataatttacagaatgtgttagtttgttcgtactatataatatttatgtatatattaaaatatatttcatatttgtaaaaaaatacttacgttatatagaataaacacggttggttcaatgaaaagacatacatctatcacaatatttatttgtttaatatacaactatttaataatagtatatacgtagtgaaaatatatacttatacataaaagaattattacaaaaatttaaggaccacttgagacagttgatggcgtatctttaacaatagaaatcattataccatatcccatagttataatacaaacgaacgcaaataatgacgcaggaacacctctagttaaaaatgttagcacatccaagtatctatttccttttttatcagttaaagaaattgcagtgacattaggaaaacctgatgatgctagacccataccacatgatgctaataatgcacagccaaaaacaagtacaggtgcagcttttggactatcaagattttctcccacttcttggactaatgggactataataatggcggaaacagtgtgcgaaacaaatgttcctacaactaacatcaaaattccaaaaatacataaaattgctagcaattcatcatgctcaattcttctttgtagtgctcttgcaatagttgttaataatcctgaagatgaaaccgcatcacccaatgctatacctcccatagccaaaatgacaatctgccatgggaaattattaatgtcctttgttgtcaatattcctgttccaaaaaataagacaattggtaaaattgcaatctgacctgacgagccaaatgctgcttctattttagactctacacaccataacaaaatagtacctatagaaacaacaataacataccattgttttatagttaattttgttctgattggagtaaacttttctaacttggtagtgttaattttaaacgttgtgcacattagcccccatgaacacaatgtagccaaaataccacagggtagtgcaacagcaaaaaactgaccccaaccaatgccatatggcttcaaataattcatagaaataatattttgtggagaggatattggcgatgccattcccccaatatctgcagccaatgcgacacccatgaccaatgcctttgcgaatggggtatcgctatccaatggatcgagcaatggtgttaataacgagtatgttaacacaggggaagcgacattagatatccacatagataagaaaaacacaacagccattgccattaggataacatttcttggttttgtacctgcagctgacaatagccaagaggctatgattcttgcaatatcatactgagataaagcttcccctaaagtaaaacctgccaataagatcataattgtagaagaccacattgatgcgaatatttcagatgaagcagctgctgcacccatcgtctttccatctttatcttttaacaccttaaataagacagttaataatggaactaaaaaggctgtaatatgcaatggtatagcctctgatgcccataagaaagcaacacattcaactaaggccatacaacgaccctcgattctatcattaaatgttttcactcctaataatataccagtaaatgtaataataaatgcaagcttagcagctttcttagtgaaaagaaatttaggtacaccaacacgcgaaatatgaataaatttccattctattggctttgaaagttcccataaataaaaatcaagatttaatttctcccgtttctcattattctctttttcaattatatccagatcaggtctaatctgttcatttgctgaaactaaacccaacatatctttccaagttttactcctttcccatacaatatgatcatgtaaaaatgattttaattcttttttgcaattatctaaattatcagattggtcagttatcagtgcgtagaattccactaaaagctggattcgttgattcaaagcgttaagagtagatatcttaaatgtatatatatctttgaaaaatatcccagtatctatcagttcagatcttgtagacatatgtaataccttatcaaacttttttgtgatcttactgaaaccaatactgttcaattcaataaatgatttcaattgacaaagatcaatataaagataaataatagattgttttaaaatggattttttctgtgattttatatttacttgagaataggttaacaaagcactattctcctggataccatcaatttcatattccacttcttcatcctcatcaaagtcttcttctgacaaatcaaatcgatttcgaagttcattatcctcatgagataatttaatgttaaaagagttggttgatcttcgcttattattattattcaataattttagtttaatagtttctatatctgatgtattagagtcaagctgagaggcaatctgttcaaaagaaattatattttctgcttctaaatcactcaacagggagtcaaacttttcatagaatttagcttccattcttttatagaaatcatcaattttcattctctcatctattaagtttattaagaatacatcataagagttattactcgtatttagttcatttgactgagaagatacagaactatcatttatctttgactttaacttagcggaaaagatatttttcactggattatctaatttgtttatattgaaagagatatcatccagctcaatagtttcttccacctctgtagttttatcaattttttctgaagagtatgctttatttttagatttgaaaaatgtactcttgatcttagaagttaagtccttcactgaagctgctttggttatttctgttcctttaggagtctcctcaagcccatttagttcattgagggttgatgtattatcaacagaatgatttaattcatctgattgtaaagtatagataagattttttaatgccacatagtcaatgtagtgattttgccattccggaactgcattatattttaaaaaatgagagaatctcatgctttatttatatttgatattttattgcaaaaatacaacaatgaagtagcgtttctaatattaggtagtaaggttactctaagagttattctttgtaaaatgaaaagttatgtttaaaaaaataatggtaaaaaattaagggataatttttataattatcagttattctaattttgctgttattaaaactatagttgttacaaaagaataatgattcaatgttgtaactttaattactagaaggacccaagtcaaataatgaagatgcaatatacaatgattcctttttcaccagaaatctcttgcagtcatttttctgtcaataggatctctgtaatatttgcgtgtttttctaaatttcaatgtttaccttttgaaatatttaatatgagccgatatttttattcagcctcacttaaaatattcacattcgtaatgaagcaaatgtttaacactgagccctgcattactgttttacttgcattagaagtatattcaatattatgtagaagattataaaatatctttttaaaaagatattgtgttttttaaagaaagaatataaatggaaaaaatctttttattaatatacactgaataatgttgaatattcacaagttgtcacgtttttaaaaactgcaaaaagataagaataaatattatattgttacatttatctttttttgcagattatttatatgttagtatttatattatatgttttgttttttattatataataattgaaaatatatttaatgtccttggtttcttggagtgatatgcagactttgtttgtaacctctttctgaatcgtgttcatagtatttatttaccttccaaaattcaaaaataataaactcttgtaaattagcaatatcggttatgacatctgtgtcgattgaaagattttcagcaacttgaaaaaaggaattccttttatccaaactgtctaaagatgactgactataacccacttgaaagaattgaaggttactgatgatttttgtcattcttatatatttatccacattgaccaatttatttggtctaaatgaatgtggatccttaaaacttggatttccatcgtccaaaaatgtaagatcttgtaagtagagattaacaaagggcacaactggcaatggagacttagaatacagatggtctttagttattgaatttaatttagttctataaactttaaaattatgatttggatgaacaattcgtaccaaataatcaaacaatgtggaatcctttttatctaaggcattccatattgaatgtagcctttcaatagaatgattttgtaatgaagccataatagttgcaacagagttaaagtttctaaagtaggcacatgataatgcgattcttaaccaggtttgtaacctataaactctttggattaaagaaagatatggagcacatatggtttctgtaacatagttagataattgattactaaagttcaaaattgctacaatatttggtgaaaagttcggttctttataatgaactaattccatgggttgaattcttagaaataaagcagattctaaagcagttagttgtttagctaattctaaaggatgtatatctgttagcccaaacgatggcttattaaattgttctactaaaaagtttgttgaaacatcaacggtctttagctttctccaaagttccaaagaatcacccacttcataggcttcactattgctatcaactgtaattttagtcactgtttcataaaacataattgattttttagtcttctctatctcttcgtcagagagcaaggatgattcccccacttcaagttgtggtaataacaaggatttgctatttttgctactattagattttgttcttgttaaaccatattgattgattattctatcatcaagggaaaaaaccgatgatctgaggctattaatagaagaagtttccgatataacagataatacttttggacatattgttgatgtagtctttaattgatggaaaacaagtaaatcattggttttcgtagcagtatttgtcagaatgttaaacaatctgcaagcaacctcaataagagctttagattcgatcggtaaataactagatactatttcattaaaaaaatttaccatagatggcaaaatatcgtagtcctgaaattcccaatagctttccatccatttttgaaatatagaacatactaatcttcttcttgttttcaatcgagaagcttttgaagagtagataccattccctcgttctgtatcatattgtgacgacttattaataatatcaaatcgtgtaatcagttcatccaccaaatcgactatattaccaaattttctaaaatgtagtagaaatgaagcaattaataaatcatcaggcttgtctaattcatcagtgagcttgagaacaaaagctctgaaggaagcaccaaccaaagcaccattattgtcaaataagatttccttttgtattatttcagtgtagtttataggtaacaaagaagtattatcttcttctgtttgacaatcaatatccagtttaaatttatcaaatacagagtttctactgaattctttttcattttcgtctaatggattatccaaaaatatgttattaactattttactttttttgataggatgtattgaagaaaatctggctaaccgaccaagtttcccctttgcatttaatattagttgattataattgtttgaataaccgcattttttaacaaaatcctcaggtgtaactgttaaatatgaaaaatctagatactctctatcatcaccaagtttaaaattaccaattaatcttatgtagctgttacaaccaaaaactacatttttgattaaaggagccatttgtgaaataatcctaattagatttttttcttcagaggtgtacacatatgaaaagaaatgttgaggttttagggattctttagaagaatagaaatgttcatcttcagttagtacttttgtcactaatatcttgacacaagaaactaattcagaaaccaaagataacaggggatctaaatttgaatctaatgtactttcataagcatatttatatttttgttgaataatataggaacatgatttgctaatgtatagtaactcccttagaagtataataatctgatgtacaataagttctaaagattcataaccagcagaactatgttgtataatatctaatctacctagtataataccaatatatgtaaataaaatgttgtaaatttcacctagtcgttccatggcatgaggtggtgtttttaaatgcttattttcagaaattatatcgttctgtgtgtcattatgaaagatattgttaacttgattatatatatgaacattatgttggttaattatatgtaatttttcatttccccatgaagcataaaatgcaaatgccttttctatcacagtgtatagtaatattactattgtgcttacattttttggtgaatgactgtttttatagtgatctgcttttatcattaaattataccattctgctaaaagtttttttctagtttttttgatatccaaatagttttttactaagtcatctgatcgtgagacacactcagtaagttgcagtagttttttcacaccatctctaatatcattgatgagatcaattttcagaatcttattagtttctgcttgtctttcaaaatccaccaaaaatttagcagaagcagtcagtaatgattctaatggtattcttgaggatatgtagttgtaagtttgtttaatcgcatcggtatttttatctatgtttaactctggttgcaaaacatcagtaaagtaattcaaaggaacccaacctcttttttgctgattaatcaaagttacttcaccccatccagattcatctgctacatggataaacgcaacatcatttttttcaaaagaaagacatatttgtatgtcttcttcagcttctaaagtttctgcattgaatccatgcagtgcaattataaaaagatatgcgtaattattgaagttaaaaatatactggtctttagatatctcattgtctgcaaaaactgtactttcttgtattctatttgataaatctaatgtatcaaatgtaattgtgttaatcgtattttcagaaagtaaagaatcatcattttgcttgtgagaactttgaatggtttttgtcttaatatactttttttgtttattgtttttgttagttttatcatatacaaaatcttctgagttgataagtcttgacgctctaatggcttttctaggtgatgaatatttaatatgtaatatattttttgattctgtggacgacgtttgattaacatttgttgtacttttcattagcaaatttttacttaattctgtattatcgtgtacactttcttgctggaaagtgagtgtatgtggtgaatcaaatttaggtgtagtaaaattagtatcgtaatgtaaatcattttggttgtgtgtttgttgtaatgttgtagtgctattattattttcagttaatgatgcaaaaacgtttttttttggtttctcatcaatggaagacccctctatatggaattcagaagtagctgtaacgaatgattcaacagtggagtttgacgttgaattagacatgtagttttcatagggaatctgtttttgtttggatgttttcttcgaatgtaaattagtttgtggggaagttatgggatataatttattatgatgtgttggagagtcatagtatactaatgatttagttggtgagattgtaatattttctatattgaaattaaaattatcttcttctttagatgagagcgaattcgtagaaaaaaagtcatcattcatttgaaagtgtaatggatcaaaatttttttagaaaaggataagttatggaatttgtggtcgaagatatgtcgtaactcgatagtttctactttttcattaattttagatcaacaattattgcattcataaatagaaaatatgctagatcattggtttttcagaagaaattgtttttattttttattttttttttttgataattttggtgtattttttatttttctaatgaaattatcttcgaagttttggaaattttgcggaatttaaatcactttaacataactttttatagaaatatcatataaatttaagtaattcttacaagtaaatgtgcgtgggcaatacaaacaaatatgttaattcagtttttatgaccagtaaacattccaaacattgtgatagagaagaaactaattagaagttctatctagtttatatgttatatttaactttgtcaatattggtttacatttttaggcaagtaaaaagatatatctttagtaagcctgcaatgttgaatttatctgaaaatgtacaatagtggttggtcttttaaacttcttagttataatgtttttgtttcacatatttactaattttacaggtgtagataactctatgaagacaatagtctacataaaatatccttttttgatgttttctctatgaacataatgaaagattggttgttgtagcttagaatttagaagatacttataattgtaacatatttggttgtgtgagatatattattttgataccagaatattatgctttgcaaaatgtttagtcgataacgatggtgttgttttttttgtttataaatatacaaatatttgtgtgcgtgtgtatgctagttactgtttgtgtagaatatggtttatgtgttatatataatcaaccaagcaagctatatttatctattttagtttctagaagagtatatctctcgaaatagggttttcatccattacatcgttgtaatatccctaatataactgtttagggtttgtttagaaaaatgagggtcgacgatatttttctaaactttccttttgcaaaattttacaaacatagataaaaacaggagtaaccaacataagtacaagagagcaaccaagaagatcaaacaacgaacaggaaactaaggattacataggtttagatatagtatataagtgtatactattaggttatcttagattagagatatagatatatagatatatgggaatattacatctagagatatagaaagaatctatatcttatatctatccaagtgaaatattattgagatttcaacaaaattaactgttatcagaaatacataacctcagcgttattacagataaaaaaataaaaaaagaggactcctcatagggggctcgaacccctgacatttcggttgtccttgcctaaacataagtttaaaagccgaacgctctaccaactgagctaacaaggatgagttctcacagcccctgttgtggaatagaatagttataaccatcaagattacataagatcctgaatgaatctagaaccaattagtgtattagtaagccatacatgtgctacaacattagatgctgcataataaaaagattggattacataagaccttggcaaatctagaatttacctattgttttagtaagtcccacgtgtattactaatcaccatgattagagaattgggatgcagttctaatccagtagtgcacctaaattaatataataaattttagggttgaatcagtcaagtcattaatgtagtaacctgaataatcgatcgagctccagaaaacatataaaaggacaacgttttctggagataaaagatcatcttccataaccgtttcttgtaaataatttatatattatatatgaaaaaaagagaacaacaagcaagtaacaagtcaagtaacttcgaataagtacattagctcgatataagccgcttaatatataagaccgttttagtaattatactatcgactatagttgattactgtctcgattatttgaattactattaatattatttgcgcttccctggaatacacaaagaacttcaccacaccatactacaacacagccccttcgtagaataaagaagttattaacatcaagattacataagatcctgaatgaatttgaaactgtttattgttttaataagtcatacacgtgctacaacattagatgctgcataacaaaaagattagttccactaatattacataagcttttggtaaatctagaacttacctattgttttaataagtcacacgtgtattactaataaccacaattagagaattggggtgcagttactaattcactagtgtacccgaattactgtaataaattttagggtttgaatcagtcagatcattaatgtactaatctgaataatcgatcgagctccagaaaacatataaaaggacaacgttttctggagataaaagatcatcttccataaccgtttcttgtaaataatttatatatcatgtataacaaaagagattaacaagcaagtaacaagttaagtaactctgaataaatatattagctcgatataagttgctcaatatataagactgttttagtaattatattatcaactatagttgattattgtctcgattatttgaataactgttaatattattcggggaagcgctagaaatatcaaacggataatttattaataatcgagacaataattgatacaatcagtaatgcaattattaatacggtcttatatattaacggctatatcgagcttatataattatactatttgcttattgtattctgcgttcgatgttcatcggttgttcgttggttgttcgtttttgtttgaatttggtacccttagcgtccatggtaatggtagacatcattaagtcatagatgcttattttgttttgtactaaatacatgcatatacttattatatagtgtacacagtataaattcttttatttactttgacttttcttttaagtgtttgatttctcttcaaatctctaaaagacatatttggtgacaaataaaatgtcttcctgatattatggtacatccgtgcaccacataatatacagaaaaactaattaaaaataattcttatggaaatgacagtaataaactctcatgttctaagaactatttatagtatttttattatatcccattgtggtagcaatgcatcattctatttccataataaattggatttcttctaacaacgaatatttgtacgattgatgttttgtccattttgaggcaggattgaattgtatatattgaaatactattaggtttgtctttatagtaataacagttttttttaattgtcactctgttctagtggttatttttggatttgatagaaaagtgaattttttttcatagttttttagatatttttgtatgaaaaattataattgtaaacaaagttttgtttatttttttcagaaacatacattaaacgttaatggttttagtttttttaatagggttggtacaatgtatatttatgttacaaactatttaccatgaattatgtttgttaaaatgatatactctgatagcttgtcatgttcctgtttgagacgttcttcgttaccttctctttcatagtttatcactttatttaatttttttaatttattggtttcaataatttgtttttgattttgatcatcttctattatggaatttgtagaaatcaaataaggttgtaaagtgtcgttaagtatctcttttcccaaaaggtttcgtccctggatgtatattgataaatatttgtcgttaaggtccttatctgtaagtagatcgttaaattcggttgttttagtattgttatcggttttgcatggcacaaaatgaagtgtaaatgttgatctttctgaagtattttttccatccatttgttttttgaaagcaatggttattataaaatcgaagcgctagttcttgtgttgtgaaatattaatgatgtagtgttgaaggttgaatgcattagaatgattatagcgttattgtaattcagttagttgccaattgtaggtgctagcgtaaaattttgaaaaggttttgtcaagagattattcttacgcgtttttttttgattttttttcagagacatgtatattgtttctttaatgggagattttgcagtttcgaaaatttgaaagaattacctaaacaggtaattcttgtaaaaatatgaaacagcgttcttatattttttttttggatttgttggaagtaaaatctcggggcacgaaagatgtgaaaaatttggacgctgataaaaaaatattttcttgttgctttccgtcctgctccgagcgaagagctgatttatggaaatcaaaatacaccgtgaagatgtatgttccatatatgagtagggattgaaaaaaaaggatgtatttcttgaattcttatgttgtattgcaagatgaataacattgagaacaagaggagtgggaggaaggaagaagactgatagagaaagagaggccatccaatctatacatattcacacacacacacgcatatatgtatgtgtgtgaagaagttgaactaggaggataaacagcatgtcactacaattattatttaatattagttctaaagtatgttcttactttaatcaagatatctaggttgatataaatgaatgtttgaaggaatgagtgtgtatatatttatagatagttactaacttgaaacatacacaactacaaatatatatatagtttctttctttcttttcttctgttttgttgttagttaattcttgaatcggacctttgtttatgtgagagaaagacccttttacgacacatgtatgataatagttatggtcgaacacacctaaccaaggatacgcggttattcttggagaaagtgtttgcccagaaacagtggttgaccaaggaggaacgacagttaattgccaggaaatgtggacttagtcccttgcaagtaagaatatgggtatgttaattttgaaaattgtttttgctaggtaactacctcttaagtactaaccctaagtagtttataaataaaagatatagaaccaaataatttagtttaaaaaaatttttttttcagttattaacagcaataataatagttatgaatttatatttatttccttttgattctttatttttgcagcagtataaacaaattaaagatatgtaggtatttgtgttatcaggttactttagtgtgtttagctgttggtttatttgtggtgtttcttctttattcttgatatcttctcttattttttggtttttctctttatctgtttgtttgtttgtcgtgttgtgctgtgttttgttctgtcatgttttctttctcctctatcctcccttcctttctatgtgtttgttttcgtataatccattttagcattactaatctcgtcctttctcctgctttttgatatcgtcccctctcatctctctctctctccctcataataggtatcctttatccctgttaattaaacatgttcttgtatttactcttttctgtaaatgaaacatttactatataaaatattttactatttctatataatttacttttacactccttttaacaaatttaggtcttacttttactttttttcttttttcctttgcttttacaatattattatctgttacttaatccatctttcgttccaacttcatttcacctttggattaatttttatcaaactttattatttgtaacattctttgaggttttcttttttaacgcgtttagctttacgcattttttacttttataaataacttactatacactcttattaattattatatttcctacaataccacaatacaccttgtaatctacacatatataattttctttacaaaacaacacaaacttcaaacataaatgaaacgtttcttgcttgcttcatcacacatatatagtagcacttacaattttcgaaaatatatacatataatattaatattatcattactaaattcaaaacatctacatatgactattaaatttaaaaaaaattttagtgttttaaatatatgtgtagataccaaacctttatattattaattatattacaataaaaagaaagtattttctttctttatgcaacaactgcccaaaacttatcccagaatgttttaggttcggaatcttcccacacgacagcttcaatatctcttctatctgtatcaatatccacattttcaattttatggataagtctacaacggaaccaaagttggaatacgatccaaaggaatataaataaaaacacagaaacgtatgcagcagcaaaatcttgaccgctaaacgaaggtgcaaacgcagtaaaaccttgaattatgataataatactcataaaaaaaaccgcataatatgccaagtatggcattaaaactgctttgaacggtaaatcatctctagagatacctctgaactttaaagcttgcataaaccgtatgtgcgaaatagatataaataaccaagtgaaaaatccagcaactgcggtaatattcaataaccagttaaatgcatttgcaccacccgtagtggtttccatatatgctaatgcaccaaacacggacgttgttataactgctaaatatggtacaccttgttttgtagtcttggataaaattcttggcgctaatttattcttggctagcccatataagatacgtgaaccaacgtatatattagaattgcctgccgatataatagtggagacgatgactgcattaaaaatatcaggtaagattttagtacctgaattttcaatagcaataataaaaggtgaggatgcgatatatgaatccttgctacttaatttgggatcattgtaaggaactaaaagaccaacgaagaacaacgagccaatatagaagaagagaatacggaaaacaacttttcttattgcacgaggcacagattttcttggatttgctgcttcaccagcagtgattcctactaactccgtaccctgataggtaaatgcagcattgataagagatgacagccaacctaaaaacctgccttcattgacatccttcgaaatgatacctggtcccattgcacctgggtgacgccagtaacggaaaccaacagggcccgttacacctgcgccacacaccatacaaagacagtaaatcaaaaacccggtgatcgctataactttaatgcaagcaatccaaaattcgaattcaccataatatttgacgggaaacatattacctaccgttaaaataacccaaaatatactaatccatgctgctaaaggtacagccgttgtccaaaattggatcacttgaccgacaacactcaattctaaggcaaaagtgacagaccaagaaaaccaatacatgtagccgttagctgccccaattgagggacttaaaaatctttgggagaagacagtaaaagaggatgtaactggaatgaaagtagccatttcacctaaagattgggttacgctgtatacaagtgtacccatgaacagatacgctatgagggcaccaactggacctgcttgtgacagtggagtagacagcccgatgaaaagacctgttccgatagtgccacctagggcaatcataccaatatgtctttgttttaattctcttttaacctctacatctttgatgacacctaattcttcttctattgattctaaatcattaatatcatcgtaagttctgtttacacctaattcatgttcttcatgttgcgatgtatatgatatagccgttttcaatttttcgtccttataatctattgatttttttcttaatctaatatcattagaggagggagacatcggagtgatttctttttcaataatcatgattttttgagtatttctttttctttatgttatattgaatattaaaacagtttaaaattacaattactttattattagctttaaagaaaaaaataaaaaaaatatagtgaacaaattaataaatatgctaatattatgattcacacgaaccaaaagcttcaaaaaaaacgacaacttgaataatttctttaattatgcctactttctttttgaatactttaaaaaaaaaaaaagaagaagaaaacaccaactataagtaacagtacaacaaaaaataaaacccactcaaatatacatatatgtgtgtttattatacttgatttgtactctaataaagtgcgtagagagtcaaaactgtactacaaaaaagtgaaaaaaagaaaaataaaaataaaaataatttgtattaaagatgttacagtacttttaatatttccagccaaaagaaaaacatcgctctacaagtctgtttgtcttttctaaaaatattaaatgtttacccgaaagtatgatgaacaacacaaaaaaaaagaaaaaaaattctttagtaagacaaattttctttgatacacgcaagagtcaatcacagacggaaaatcgaagaaaagataaaagcggcggatggggtcaaggctacaggacagccgcccgtgacaaaaaacattacaaaatcaaaatgaaaaaaaaaaaaaaaaaacaaatgaaaaaattacttcacaaaccctatgttcacattagggtttaggcaagggtttttaagttattttttacaataaattactggaaacggtatataaagccaaaacaagaaaagcggttgcgtgcctatttcaattaataaaacaaaactaaacaaaacaaaacaaaaccagtacgaaagttatacaattctaagcctagttctttacaaaatttcttttactgagctagtacactaatataatctatatctttggcatacttaagagacagtcataaagcaagaaactcccgaattacccacaactacaactgtattgcgatccttttttaaatacttaatacatactagtggaaaaacaaataatgatataatgcgtagtgaatcatataataatattaacgaaactccccttccatctgaccctcctccttatactgaacatgaggaacaatatgaactcgatgacatgagaaatgaagaattcattcggactcttatacaggaaaataattctaaatctcctttgcatatggctttcatgaatatggcaaacagtatattaggagcaggtatagtctcacaaccatttgcaatcaaacaagctggtgtagttggtgcatttataatatatatactacttggttttattactgattggaccttacgattaatagttaaaaatttggtcatctccggcacaaacacatatcaagacagtgtgcaaaaagctatgggtaaaaagggtaaattactaattatgttagccaacgggttatttgctttcggtggatgtgttgcattctgtataattatcggtgactcgatccctcacgttttaagaaccctggtacccgcaaattatatagaaagaaattgggtcgtcatatgtacaaccatcttcatctctttacctctctctttacataaaaatattgaagcgttagaaagagcctcgggcttagcattgattagtatgctcatcatcgtgttaaccgtagtcatcagaggccctttgttgccccagagtctaaagagtcaaataactttatttcatcccaaatggtggttaagaaccactatcttcaaaagtatatctattatatcattcgccttggtttgtcatcataatacaagtttcatttacttctctctaagaaataaaagcatcgctaaatttaacaaactgactcatcttagctgcataatatctgtgtttatctgtatgatgatgggatatttcgggtttcacgtattcaaagataaaactaaagggaacattcttaataatttctcaagtgacgatatgtttatcaacgtggcaagactattttttgggtttaatatgttaactacatttccactagaaatatttgtattgagaaacattgtaatggatatattaaatgacctcatactagaaaatgattattcaataattcacgataacgaaaatggtgatctttcctcaagaactaataacattaacaatgatacaaatgatggaaacaatgggactacacttacgtaccaagagcaaaataacgaaaaatttcacacagtaattacactttttctggttttgagttccatgggtatatccctgactacatgtaatttgggtgcgttattcgaattaattggttcaacaacggcttctataatggctttcattttacctcctttgactcatattatattaaccaaaaactcccagcatactttctcacaaaaattaccgtattacagtgtaataatttttggatttttggtaatgattatatctagttctcaaacgatttcagaatcattaaataaccacgacgttaaacattgtgaaatctaattttactatatctatataaattttttaaaaaaaaaccaaaaaatatcatatcagtgcatagaattctttgacaaatgttagtactactgtctttttcaattttacaaaagtaaatatacgtatatatatatatgaaaattctacaatcatatattttgttgtattattagcttcttgaagaagagaaatatcgaaacaataaacaatcgaataaataatgcaaaaatgttatatttagtttttttactacttaaacatataaacaaattaaatatatgtaaagggagcaaaaaaaaatattcattataaattttagaagacactttatgttgatttatttatatattatccaattagattttttttattttatttttcaacttctatcagtttatatatgtaaaatttaacataaagcatttaattaatattattctatttttatttgattatctttttttttttaataagtacataggtagtaattagtaaaaaattagaaaaaaaagttttactattagaatatgtattatatagagtaatacttgattaccatgtcaacaaaaaaataccaatgtatatgtatatttaaatatatatatatatatatatatatatatatataatctgtttttttgttctcttatttttttaccttttactcataatataatacggacaagtcgacgcattgtctattgtttcatttttttctttgtcctttctttacattctaaacaatactagggctttttacagtcccccgcattttttgttcctttgttttttttttgaaaaatcattgagagagatttttaagttataacaatacatcttttgttttatgttttaagagcatgcagaaatttgcatacatcatcaaataatacaatatactttagaacaatactaattttaaaaaaaaatgtgatacttagtatgatgtgaaaataaaaaaattgcaagtttacaaagaaaaataaaactaaataataaagaatataaacaaattattttcacatttctaaacaaaataagaatttgattgattacacgtacaaaaaaaagttttattttttcaaacgatataaacatgaaaatatgtgacattaaaataataatccaaaagctatacttacataactagaaaaacaaagtaacaaggaatgatttatatgtatgtatgtatattttgcttccaatatggcatcccaaactaattaaatggaaccggttttaatattaacaaaattccggagaaaaaaatgtcctactaataattacataggacagaataaaggctatagtaaaataactactagcaataataattacacatggtagacataaaattcagttttattttataccgacataaaataaccaggcttttattaaagttaagagaaaactttgttattttgtaatagttatataggattctttttttttttaaaattgggaactttcaagaaaaaatcaccatatatttaaataaacaaacgttgccatttaaacaaaatcctttaaaaagtgaaaggtttagcaaatagattgcctatggtaatttattaatacaataactttaacatttcatattatattttgttattttaatgattattaattatacatttcgatgccacttactcataaatatgtgtatgaccacagtactgacaaaaaaagcaagcttagtaagttgaaatattgcactcgttacaaaagcaactattcaactaacataataaaaaaaataaatgaaagataatagggaaacctacaaaagtttaaagtactttgattttatattgataaagtatatatatatatgtatgtgtgtgtatgtatgtatatagcattgatgattatgattataatattttattaattcttatcaggaacaattttcttaaatataaattttattcacataaatttttctattatttacagaagcacacgatagtgtgtgagctttcaaatgctaagagattattcagatatatcttttagtatacattttaaaactgaaaataaaattaaaacaagtacataactaaacaactgtataaaatatagatatcaatagaccgtgacattgaaaaataatcaataatgtgctacaaaaaaataaaaactttttcaaatatagtttctattcattctgatactaggtcaatgttatttgataatttattaaggatatttttacagcttttttttttaaaaaaaaattatcatgatttaaaacgttaaaagagaaaaaaaacaagggaaaattggcaataataactacgagttgaattttgtaccaaagtaaaaacgattatttaactatcaccttatataagtttaaacattgtaatgctaataaaggttcatataatacacttaaatatttttccacgttagataagttataagtaggactccattttgataacaaacaaagggtattttttccttaaggtattcattttcactaatatgacatagtgttaatgtactactatatccaaagtaactcttatttgtagaggatatagtcataataaacggtaagatagttaaattataaagtcccactaagttttcagttaactacgattcattaacatgacataaaccattattatctaataatattttatatatgaacagtatattaatatctaactttaatattttggaaaaaatattccaagttctggttgataggttaagcaaaaattcaattatttctaacattattatgaatatcagaaaagttaagctcagttttctattgaatatactcctattattttcaggtgtcgaaccaactattaatttgttatagcttattgtgaatccataaagtttcaacaaagctattatacctaataaaccggaattggggcttagaaatatataaaaacaattccaggtttcagattttaccgaaacatctgctataatcatatggaactttattgtgattaaaccaacacatagcatttgtcaattcttctagagttttactgtgaaaaccatatgagaaaacatcaagctcttttgatgaagtacattaaacatgatttatataagagacacctttaaattctttttatgagtttgtttgcatagatacaatattttaatgtgctattactattagtattattattattggttagttaggcgttgaattagtgtccattttacagttttttgaaattgttcgagtaaattagacaaaatatatgtaaatataagcctgcacaacagtagttgttttaacgtgatatcaaatatttccatatattctaattttttttttttacttcaattgaaaattttaaattttttttcctaaaatggaaaactaatagaaaaaggatccatttgattaaaatcgtgtaataccgaaaatagtaaagatattatatcaaccaaaatgaagtaaacattgtagacatttcatcatccaataagtattgtttccaagtataattgaagcctcctaaaatgatttttttttcattattcagatgaatctttgactacactaatacatacttccttctagattataaaaataactagaagaaaaaaaagttattgttgaattattaaacttcaaaagttttcgtaaaacgataagtagcatttttaaaaaatcaaggttttgaatatttttcaaaaacacaagtaattctgacaacttcctacattattgctcttgataagagatgtgccaaaattatcaacatcctaggttataagtaatggtgtatctacatttccatgaaaaactttcaaaccagaatatcttttcggaatccttggatacgtaataatataaagaatgctacagcattttgagttacttggtagtgaattgtctatctctacaatggcttagtctgacaaaaaaataaaaaaaaaaaaaagaaaaagaaacaagagaatgatgaaagagttagttgaacaatgttgttttttttcttttgtttcatttctttttatattttatttggatttttttttttgttacgatatggtatcttaataacgacaaaactagtaaaattcccagtccgaaatatcctgaaatagggcatacatcttaataaaagaatgcttcatttacgctgacacagggttgtaatgaatattcccagaagctctattgtataaataaatttatcagtagatttgtctagatgctttaactgaaaatagataggtcttatccacttgaacctgtgaatctgagtattgaaaaaaaaacagaatattgggtcttacactagaaaacaacttcaaaaaccctgaaaaaaattataaaaaaatcaaaaagagaaatgaagaaaaagaaaaagaaatagaaaaagaattatttctcttttttatctgcacaaacaataaaaactggacactttcatattaggaaattttccacaatttttttatttccatggtgggatggaaaagggaaaaagctggtgaaaaaaagtgtactgggtaacaatttatagggctgtagtttgtccttccagtaggataaaacatttttactttttatgtattaggtttagattcaaaaacaaaaacattgtaggggaacaaagtggtattttttcctattgagggctttttgttggaagagtaaatttaggatagaaaaaaaatgcttccaataattcgaaggtttatccaatggattctatttgaaagatttttagcaactcgtctctttttttctcgactaaacaaaagacgacgaaagaagtaaaagattcaagtttttttttaccatttttagtaaaaagtcaatgagctcgtgaaagattttttgtctctattacaatatattggctcctttcaaaaaattaattaaagaaaagagaggtaagaagaaaataaaaaacaatccattcaagataccaagctcactcctcccttcttgtattttttatcctttttgtccattcacctttaattcctttgtcattctattattctttcatttacttccacaaaaagtatatagcttgtaattagttgtttgttcttttgttttttaggctaagtatattattgctattatgttattgctgcttattattttcatatcaaagatattcttaaaatgattagaaaatttaatagaaaaaaaaataatagtactatatgattataatactgtactatagacaaatatagagtggaagaaaaaaaaaaaagagagagagagaaagagtagtataactttgattcattttacaatttctttcttctcaaaattatttaaatataaaatcatttttgttatagattcgtaatctattattgttttgccgggtttttgatttcctttctgctctgcctttggactcacttggagagatactgttctcgggcaatcatagaaacatacaagaacagcttctgattagaaaactggtccagtatttcactataatatagtaggagcaaatcacattaattatttattgctaactggtcttggtatttcctaccttattataccctttctctataaaatctcaattaataatctaacaatatttaacgaggtgtcggttttggttcaacttgtttcatcaattgttgtttacattttttttttttacttcttttcactctatcattaacaatattaacgactgctattataaaaacataaaaaaaaactttaaaggattaatttttttataaatattttaatgcaataaaaactaattatcaattgaagataaaattaaaaataaaaaaaaatctgcatcattctcattattaaaatcattcatttaattaaaaaaattaacaaaaaaaacaccttatcacattgcattttttagtttaaaattttcattttttttttataaattttaaagcatattcttaatttcattataaatttactttctttttccctccttccattcttaattattctacttattattccatttttttttggtttagttcattatggcaagaagaaaatatgtcaaacttcatccaaatttagttcagtcagaggctttagccagtgatgttgctctgacttgttataaacaaggcattttaaagcactatagttcattgcaaagggatatgagtaaatcactaaatcccattatgattgataatcagcccgaaatcaaatggtcaatgagaccgtatttgatagactttttggttgaattgcatatattttttgacttatccccagaagctctctatattgcttctacaatcgctgatagatattgttccaaaagaatcgtgtataaaagacactatcagttgttggttgctacatctttatggattgctgctaagtttcaggataagaaatctaaaatccctacactcaaagaactttacttactttgttatcaaatatatgaacctcaaatgttcattcaaatggagagacatattttaaccacacttgagtggtctatcggaaacattttcactgtttatgaatgtttgaatatcatattcgatcaaagtaatttattttgtaaaggaaaaattgaagaggatcaaaaactattccaaatgacttcatttctcttggatttatccttgtatcaaagagactatcttttttttaattcttcaattagaacaatttcagcacttttactttcatcaacaatactagatcaaactatcttcccagattacattaagttaattattgatactaataggatcagtccaagtaatgatatgtcatcagctatagacaatgtggaattaaatgagtttttatttaaatatatcgctggcgataaacctaatgaggggactgattcgaaattatcattggatttcattattaatgatgaagctttaaataatattagaaaatgcttattgttatatttaaatgacatctttaaagaaagagttgcattagttaattcttctattattaaaaatcaatctgataaatataagatatcagaagttctttttaagaaatatgaaaaattgtctattaaagattatttagatatctttatatctaaaagattggaaatatatatccatttaaagaatttgaaagaaactaaggaaattatgaagaagaatagttcatatatccaaccttggttgacaaactcaattaatatgtttattgataattttgccggtcttcaagaaatttgctatgaagatgaagatcctctaactaataaccctgtacatactagttgcaataacaccattctcaaaatgggaatgaccagcttattatcggatattagtaccaatataccacaaagtcttagagttcaaacgcccgttgatcttagtgttactaccccattgattaataggtttgcaacatcaattactccagtatcattgagatcgacatcatcattatccgaaaactctttatctgaatcaatatcaagaaactcttctattttctctcaaccttcatatagaatcgagtcaccaaattacatagatacaatgacaccagtgtcagccacaattcctggtatttcttccgtcaatattaatagcaataatgtgcatggatacacaaaaccaagaagtaaaacaataaactatactagctatttacaatttaagaactcaactttgaataagcacagtaataccagattgagtactggtgaatccacgaaacaacatctaaatagtagtggtcctcctaccccatcagttggtagacataaatataatgcatcgttttctagcataggttcatctaatttgttttctatcgatcaatctcctgtgcttaaatcagataagaaaaaccatttgcgtgcagaaaaaggttctttgggaagaagtaaggattttgcggctatagataattggggttcaaatgagactattatggactcaatagatccattaccaacaaaatacagaactaccagaccgcaatttaagcaacattgtaaatctcgccatactacaataaatggcattctagatttggatcaagtagctctagaaacgacagaatgatgcatttttgttttacgtaaggaatttcaaatttatttattcataaatataatatatatatatattaaaatgataaaaagataaacaaaaatattaatgaaataatgatagttaatttttaatctaattgattgaagtggagaaggtaaaagatagttaaggtcttatttttatcataaagagcctatgtataaaacagcgataataagatttttataaaaaaaatatagtaataatcatgcaacagtgataaaaacaatggttaaaaacatagatgttatttaaattaatgatgttttttaactatcctgttgcaggcttcattccttttgtataatatcaaactgtcagtcttaagaagactgaaaaaaatgaaaaaatagcatgcaatgattaaaacctcttaaattacaatatattcattcttttagaattacaatgagtcagtcagaaattaatatatagtttttttttaaaaaaaataaaataaatatttggtaggaatattaaaatttatataggaaagtattagataattcttaatgctcgtggtcatttattttcaaaatttttgaaatttctgccttattagtgtttaactttctcttatataagaggtactttatagtttgatgataacacataaatagcaaaataaatatgaataaaatcagcattttcctctggaagcggatatcttcttccagtttttgaattctatattgatttttgttattaaaatcttcattatttcttttttgttcttccagtagtattaaagattcctcttttaattgtttggcaaactcttttaatatgttaatgttgttcataactgtaacattaaaagtactaactaaatggtcaaaacggttgagatatatcgtctctagttgatggaaagacttagaaagcaatttactttgttcttcaacataaagaattatcattgtagaattattttccaaaaaatttatccttctaataatatttctaaatatcgaatcttcaggagaggatgtggaagctataggagataatttttttaagacatctgtaccatttctaccgagagtatttgtcatgttggtattatttatcaccttagctatcaaatttgagcttgataggttgtgtgagatttccctctcagaaggatcacaattaaataaatctggacttaactcttttaaaaattcctcaaaacgtaacggttctaagatagattcataccattccataggatctggtaactgtgggataagagttttattttcagcgttaatatatggccaattatttggttcatctaacagatcactttccattatatactttcgttcagtcatttttgactttatagattttgttgaagaaggttcactccttgttgtatctgattccctctttgtagtttcaattaattcatattccctattagcagcatttgtttcattggtatcgatgccattagcattattgttaacaatctgtttttctagactagatccttgtttttgatcttctaatacttgtgacttaaattcatccatcattgttttaccatgaactctaatcaaggatataggacagtaaaattcatcgtcataatgatttaaaatttcaattcgtaagtacttggcccatatttgaggatttgaaatattgaatctttgtaaacttttagaattggtccctttaaattcacctaactttgtccaaccatttcttgggactgggaacctatctgatacagaaacaacaaaatttttgaaattagaggaaaagtattcaaaattggccataactatttgttctactaatatatcttcacataattctattataaaaaattgatttggtgcagaacataaatttaataaatatttatctttattttctattagaattgaagaggcgccagatgcttcagaatttgttttaactattgtggcagcacaatcaagagatgcataattgaatttatcattatatattttaccctcaggttccgtgtttggataatcagaagaactaaaaaggtttagatcaatttccatttcttcgccaacacattctttttcaccataacatgatgtatcaactccagtacgaatatctagagatctatctataaatttttggttattaattatttcttgttctttaatctttttccactcatcaaatgatagaaacgtatcagaattattggcaaaactttcttgtttaaaatattcgagatcaacacttttgttggcaattttatctaacttagaggcgatattttctacaggagtaatcaaagattcattttctaaacttctggtatcatttgtagatattaataggtcaacaatatcagttagggcaattgtgcaatagcatagaatgatcaaataggcaataaacataccatgcagtaaataatgtttatagtcgagaaaaaaggaagaaaaatgtttataataatacttttttaaatctataatgtagttctatatttatattcttatatatcaaatagatactgaccctcgctattgttatattattcttacagaagtaagatgaaaattggattgaatattaaaaccaaaaggaaaagaagctgagtaaagatcaatttttataaataatcttttaggaaaactggtatgccaggacagtactgctcggttttgttataattttcgtccagcttattttttttaaaaaattcaatacaccatgctcctcacttggtttgtcagggtagttgattatcaatagcttttctattcttcttttattttctgtttctgtttttgacatggtttaagaaattttcaatgattaaaaaatatcttgtcgatgttgagaaagtgattcttgatcatttaatacgataccgttcaaatgtacatatgaatgatataatctatcttaatggtgcctaaaacagatcaaaagcgttgaattacaattcggtattcataggagattcagactgtacctgtggtttaggatattttagtctaacggtaaacgatcttgtgttagccttcacaattttcaccttgtcattaaatggtgttgatgagatcgtgacttttttatacttgtttgataatttgacaaatctaataggcaaaagtccaattctatttacaacaggtttatttgatacttttcttggttttgaaagagtaatcttgacttttttagcaccagtaccaataatggtactggtcatcttacctttctttgatcgatctgttggcttttggactactttcaattttggtgctgttaagtgtaattttaaaataccattcctcttgattatcactttattgttaccttcatatcttgccactagttttttcattctaggtgaaactaatttcaccttgaaactatctgtcaacgtatatattacacgcgctatatcaaacaaactttttctttggtacagagttaacgtcggtgtatgtaatacatcccagatgattttttttagtggtgaataatttttaaacttatctctgattaatcttattctgccaccaatgttgttgttcattttggattcctttggatccacaatttcatgacctgtctcaccaccaataattagtgctgcaatttcatcttcattctcaaaattcatctgaggaggattaattctttcactgagatattgaaaatcatcatcaaatgtatccataagtttattttctgcaattatattcaatgaatcaataaagacgtcaattaatttctcccttatgtaaatatcgggactaaaacataaggcttcgaaaaaataacgtaaaataaatttatttttaattccaccttcaataagcataattctaaatgacaataacgctatatcttcgaagccttctctaaatttaggtatagaattattgctatgacggtttcttatttcctcattgtcaagggaatatttcaaaatataatcaatatctttaaattcatacaaatttgacatatgcatctttagtttctgttccataatacttttagtgatcaataattggtatgagggaatccatttatccaaattttctagtctttttaattgatcaagaattctttttgtaaacaatttatcatcatgattagttaaagttgagttaacaacactgtcaattaatatagagacaaaatgactgtcatcataataattttctgaattttcattataagtcaaaatatccaacagaaaatctttcacaaacccaggacattcattggtttcatttttaatttgacttaaatattgaggaatttttttttgtaaaatatatttttggatattaccaaaatcattgtttcgaggaatattggagtcttccagacaaaataaagcttgatatatttttactaagtgatatgcaccacctgggaaattttccatggggttgtagacatattttgacagagcatggcaagcttcttgtcgtatcccataaaaatatctatcatccattgcagttcgtgttagtatagatgagtacactaaagaagagtgattagatgaactaatcacatcttcaaaatatcttatactctctaactgagcttctacatcaccatcttgttgaagttgtgaggtaaacataaaatcaggttgattaatgtatgttttacaaatccattcaaaatctgaatcaattctaatccattcaaaagcttcattttggaattgagattcgtatccatcagtggctttcgctaaatctgttaaattccattgttcacattcttcttgagttaccaagacattacccagtcttttaatatccccatcatctataaaattcttggaattgtttggattattttgcattgatgtggaaaaaaatgacgacgtagtaaatgcgctattttgtccgtcttcgtggtctaacgtatttggggctctattagatctttgtggtcttctatttctgagttttctatatttagtattgtactgaatatcaattttagtaaacaagtcttttatttctacgatatgttcgtaaggagtaccatcagtttcatggattctaatggtcattgagccagtaaaataggtagggacatttctgttgggattttctaaatggtgcattgcactactgaaaaatcggtcctttcctatcactttatcagatgtttctaattcctgttgttgacattgtcttatacccatttctaccatcattctttttttattaaatctttgagtaacacgaaatataggtacaccagcaccatatacccactgttgaaaaaattcttctaacttattcttatttacacgttcacagacatgttgaaaatggctggctgataaagaattgtttggcaaatcacctgacatggcttgcaaaaaaatctttggcaaaacacgggacataccaaaggatctttctgtctttgtcattcttctatctaagatataaagtaccatgggcgcctttaacttaataaaatctaaatctttgcttgatactgagataggccaagatttgcctttaaacgtagatccaattggtggtttttcccaatctttttctacaatttcctcgcatgtctttttcaatctgtatttaaattcattattaccatatatatgtttagagaattgtttaaccatgtaacctgccataccaagacaacaccatatatcgttcatttccaaaggtgtaatgttgataccagaccattgagatgcaattgaccatgcaagtaaatctgtagtagtaaacatttgatctaaaatattagaattgtataataaccgtgtattacatattgtcatactggcgaaatccatagtctgattcgttacagatggtaaaaacactagagaatatgatgtaaatgggtatgaaccaaactcttttgaataaaaatctatgatccgctggcatacaaaagttgtgttgattacagtatcttcatcaatgtcacttgatggtaaagtataaacgtttatcggtataaattccataccctctgtactatctaacagatcagcatttatgtcatcatttaccatattggtattgtcgttgtaggcgttatcattattatcatgatttaaattatttttactttcatcattttcctcattttcttcctcattactattttttaaaaatttgtcattgtaaatcaacgatggtaaattccatacatcaaaagagccaactgcccaaccaatgtgatgtggagctacaggattaaaaatctggaatataaaaactttttttgttaaatcaattggatgagctatttctctcattgttgaaaattcagaacaacaagcttttatttctctgtttaaaaattttgtatactcattaaagatcgaatctttgccatttgttttcttaatattatcttcataatcagaatcatcatcaccctcatcttcttcgtcttcctcatcctcatttccctcctcatctttatgatggatgttttcctggattgtaatatcttgtgtgttagtcttatgtgcattatcgttgctgatattgttgttttcattagatttattagattttttgtttatagttacaacgttttgattatttgattttgaatctgatttgaatcttgattgcgcctgttgaatgttattatcatcatcttgtccaactattttacttttaccaatattcctgacttttttaggtacactaatttcgatttcccaagtagatttttcttcaaatgaatcaatacagggcatccaatatgatgcggtggaacataactcattatttgcagtatatacattccataaatgtggtttagattcatctaatgtgtcaaaacgaacacctgtatttggatctttaatttcatattcaattctaacagttaacggagtgaaaatagtttcttgttgaaaagtttgtggtgtgcctctaattgatggtgttattggagtgtaatttgtcaatgaacttgtatcttgtaacttaatctttatagaagatggaattttaattaacaattgacacttatttctttcctttgggaattcgtttaaatccgcaaatttttccctaaagaagtgcgactgctcaattgaattatctctatagagtatatcatcataaaacctattattcctatagttgttatttgcagtagtgttagtggtattattattattgttattgttattattattattattattgttgttgttgttgttatctgagtggatatttataaatttgtttaaataatctctaattggattatcatggatataatgttcgcaacgtctattttcaatccaaacatccaaaacattcaaatctttgcaatcaaaagttatataatctaaatttttgactaacggaataattactatgtctgcaacacctttaatactatgatcttgtaactgtatgtctaaagaaactctttggtgtgccactttgaagtgtctatatgataaggtgtctaatacagaaagttgttgtgatagtgaactgttattagcagggtcattcttacgattggtggtagagggagtagtggtaacaacaccgttaataatgctaggaggagacatatgtccagtggtcaataatttaggaaaagtctccaactatgatggatatttgtttagggttaatagttaatcagagtgtacacaacagggaaagttaatgggacacacgtttcaaatacgagatgagttaagaaagaaaaaagggagaagattaatataaggtaagactaatggtgtgtggggagtaagaccatttggaatgtttattggcttcttgtcttgtattcttttgtttcttattttgttaggttttctttatttttaatatttttctttttctcttctcattctcttccgtttttgtttatattttcctcttgggaagacatttcttaaacagtaaatgtgtacccttttaggaaattatgaagaatatagcggatgaaaagacaatgtattaacttctacaagtgaatagatattgatatagaagatcagcccagtgttggttattgatacagcactttagattaggctggttaaagttacttgtaacgattattatgacatggtcctttttaatatttatacaacagtggtagaaaaactaacatatataagcatatatatatatatatatatatatatgacataagttcttattttattattattattattattaggatttaatgtaatgatattctaattccatattaacatggttaatcttttcagaattataattgtgacgatcatcatgactatgactataaatattggtatcaatatctctatatgattttttaatatatctgttcaaaagaggtaatttggacaatgaataaataattaattgccagttgaatatgaaatagtagatccagagaaagacaaaaatggaaaaaattatcaaatatttgggaaaattgtcatatattttgcctcttagtttatccgaaaaatcaggtttataaatttcttcattaatttgaaactgataattgaaataccctagcccatataatctttcacttttgaattcactgtcatgatagaatttgttggggttcaatacaatatctatatcttttgtatcatggtacagatggtccctaattaaagatgcgtctataggatattgaatcatttatcgtaatttctctttatacctgtttctttttgtttttttgcccttttattttcctaaaaacacacaacacacacaggtagactatagtataacgatagcgttaggcttgttcttctaaccagatggttgtgcaaatgtacaccaagaagtagtaaactattctgtatctcattatttcggggaaggttatatactgtagatctatacacactagcctataatatccttcatatttatccatgtgattgttgtgctgcttggaggttttacatttctctagaaatttggatattgtatttttttggttttttttttcttcgaacgcagatcaaaaaaaaaaacaaattagaaatgaggagataaaatgaaattaaataaaataaaacaacacacatatatcatatttacatatacatagatatatatatacacatatatatatgcgcgtgtgtatgaatagactgataagcatctcattgataagatattttacgtttttttttttgtttcaaaataaacaggagattgctgtctacagatatatttttgtctgtgaatattagtttatttttcattttaatattttcttgtttgtttctataatgtaattgaaatcttcaattaaaaattcatataaataatacgtaggtaccactgtagctgcatgccataatgcatgtgcatcgatctgataatcataactgaaaaaatcaaataattccaaggacatagccagtccagtgaaagttactaatccaattggaattatacatagcttcagtattctttgattgtatctgtaaacaatttccttcgacgattttaatgatacatagttttgatacgataatagtaagagtagcaaatattgtaagatcccgaaaaatacattaaatctcatgttgtatgtgtatgaccagtctaaatataaccttaaaagatggacaataaatataaacaccatacaacctttaaataccatagaaaatgtttcatataaatataatcttgtcattctagagaatagtccatggaacgcaactaatacagtcaacccagcgaaaaaataatctaatttctcagtgattaataagtctcttaaatgaaatattgtactagccgaccatgccaataatcctgctattgcaacgtacatataattaatgaggatatttctgtatggggtgcgctgatatttgttgaattgtatctgtaatctccgtagaccataataatgtggaataaagtttccaactgaaaaaattacagaaaagaattcttgtgtaccaaatattcttaagaatggccatttaccatgaaattgatagatttcctcgttttctttaatccttctctttgttatgatttgttggcattgataatcacaatctgagatacaatcccaaaataaaaactttttatagatatatggtgtatcttggaagtcaattccattataaaactcattcgttatcgggtcaatataatttatcatagaacctgggcattttcttttatattcacaagcataggcacaatcaatgaattcgtctagattatcacccggtgaacttaaagtccctttaataaagatcggtgacaataaaaataaaaacaatctgaaaagattcattatggttctatttagtttttgattactactctatgtattatcttgttccgttttttcttttcctttcttctcttttccccttaccgtccctttacagaatgagaataattggttcaatatacaaaaagagtgtcagaatcttatgaatctcaagtttttgtgtcagttatcagataggttgaactaagctgaaactgttatagaggagagaagggtctgtcttataggagaaaagaagagaaatgaagtgaatgaataaaggtttaagagaaaaataaaaaaaaaaaatttttttcttatggatctagtctctgttggcgaaatgtaaagaagaagattattatagtgtttatttacgcctgtctatctatataaatataaatataagaataagtatatgtatagatatgtatataaatgtctatatttcactttctgattgttggtcagatttttcatttttcaatgcttcaatcagtaactttctactttgaataataaaattgcgtaatccgtcgggttgttttaatgtatcaagaagcagtgtatgatcttctatatttcttaactttggtatactatctacaatcttaaatggttcctcattctcgtttagtgatgtttctagaataattttacattctctatttaagtcggtttcatcaaatttattaaatgtaaatattacttgaggtggagtgcctcggtcctgatttctatcactgtttgcatctttccatttattactttcaattttcaatccaagtaaattttcatatattgaaaccttctttattttcatctctttcctctttattactttctcctttaatttcaactgcctttgtttctctttacttaacagagtttctgctctttgtaagtctttttgtaacaattgttcctgtacctgcaatgtcttccattgtgattcatattcatcaatcttacttttgatttctttattatttctttggagttgtgcgtattctttatttaattggtcattataaattttcaattgtgataattctttggttaagtcattttcctcccgtgttaacgattcaatttttgttttatagtctgtgtatgtttttcttgttaaatttaatttatttaatagattcttattaacagtgtttgtaaatacatctatcttctccttgacagtatcgaattcttcaaacataatgtttccttcataaaattaatggatttttcgttaatgtgctttaaagtgtgttaatttttccttatttcttctttgctctgtgcaacagctgttactactttatcatattttcttgttctttgatacttttccctttatctttgtttttgctctctccctttatctctctttctttcttagtgtgtgtgtagagaaaactcgagagcagctttgtttgcttaactttttacggcttacagcttacaatctttaaatttttttcataaagtattaaaacaaaattggaatccttttctcgagaaacacaaagagcattaatatactctgccattatcactgttgatatgtaacctacaatgtgtatatgtatttatagttatatatatatatatatatatgaaagtacgagtagcttattcaaagattaaatggtaggcagaataggtaattgtctaatataaaatcatacattttttcaaattttattattatgactcaggttgctgaagaaagacaaattaaatttttaactttcaatacatggggcttgaaatatgtctctaaacacaggaaagaaaggttaagagcaattgcagataaattggccgatacatcaaacaataatggtaataacggcaataataacaatagtaattttagtagtagcagtagtaaaataatacctttacatgactgtattagaaatacagcaatgggaggcatcatcgaagaggatgcatatccagaaggtgaaggtttgattgactatgatttcgatatcattgcattacaagaaatttggtgtaaagaggattgggactacttattagaaagatgtagtactaaatatcctcattccagattattttattctgggatattaacaggccctggattagctatcctatctaaaatccctattcaatcaagtttcctctatagatttccaatcaatggcaggccaagtgcctttttcagaggtgattggtatgtagggaaatccatagcgatcactaaattgaaacctatagatgcaaattatccacccatcgttgttatgaatagtcatatgcatgcaccatacgctttaactggtgatgcggcttatgaatgtcatagatctgtgcaagcatgggatttcagccaattaattaatctttataagaaagcaggatatgcagttattgtggttggcgatttgaattcgagaccaggttctttgccacataatttattaacacaagagactgggttagttgattcttgggaacaactcaatggtgaaacgaatttattcgatttgaagcgcatgaatccattagaccagttgaaatacggttgcactacatgtgattctttattaaatacttggagagcaagtagaagaccagatgaagcatgtagattagattatgctttgattgactcaaaaaggttaaagacattggatgctggtgtaagatttacagatagaattgagaatgttggtagtttctctgatcattttgcgtattattgtaagttgaaagtattacctttacataataatcacaataacattaatggtcgttcagatgaggaaataaatggtatcagtaatgggagagacttacaactggttagatattcaaattatgaagctttactaaaatgcatcgataattatatgataactgctaggaaacaaaaattctatagaggccttcatttcttaacatctattttcttgtcaattgcatgtatggtggtgactagttttacatcagcaaaagcaagttggtcatctgttttttgggttttgtttgctgtagtggtcactgtgacaggtgttattgatggtttaatatcattccttttcggtagaaatgaaattagagcacttgttgaagttcaacaggaagttcaggattcacaaagaagtctacaagagattcttgataatcaatgattattatcaaaatcactcttttcgtttttgaatgtttcaatcttagacttttatagattttttacaatatacatacatatatatatatatatatacggttaatatatgatgagtattaactcttagaccttttaaggagttgtttatacctggtttaataataataataataacagttatggatatcaaagaaaattaaagaaagcatggtaaaaatctgtaatgaaaagtaaatccagaatttggttagtccttctattcttttgtgtaggatagtaactgtttatactaagaaaagtaaatgagaactggtacattattcaagaataactagcggatagcagtacctattttagccataatggtgtaattattatatgttatttcctcctagaaaaagatataatacagaatgtaataatgaaaaatgtttatttattaaaaacagacaaagtatcttattataaaaatcgatatgtaaaaaatacctcttatgaccttacattatgtatctttcaatgataaatgctataaaatatacaaacttggtctttattatttttgaatgttatattacaagaataatttagaccctttgggtttagataaatgtatatatgcctaactttttaactattacaactatagctggtttatactttggaaaagtattgagtaagttcgccatagttattatatgtgtttgtatatgtgtttgtattttttggaatttacactattggtttgtatataatctaaaattatgtgatatttaaaataatgtttgataacaaaatgaatgttagtaaattaatagttcaattagaatatgggttctttgttggagtatttggcatatattgagaaaatccgcttctattaatagtagagttatctggcggtggaattcttccaccctttattggagtagtattttgtggaccaaaagagttatttcgatagttaacttgagatggagggggtattcttggatatccattcattaaatgttgcatctgagattgttgcttaaaagtttgtggaacatgtaagtcattacttggtttattgtaataatttgaaggattagtgttatgtagtcttgattgggttccatgaaattgagaaatattttgttttgaattagcgttagaagttacagttgtagaggtgggagtactgtcttgggtcagataatgtaaatttatacttgtgcttgacttaggaataaactgtgtactaggactatttggcatttgtttttctacccctgaattagatgtcttttcattttgtttactataaaaattttgagtttcatttatttgacattgctcgaaatattgaggatcagttacatcaacctcattgctttggttaatataaggttgtttttggtttgctaattttgattgtttctcttcaataaatgaaatattatttaaatgtaacccagatataatacctggatcaatttcgtcatcaggaaacatttgtggtttcatactgaatctttggttaaaagaattggaatcttttccacctattaatgcatttttagactcattcatggaaataccattaatcttgtctatcaaagtaggtaaatccttatctatgttatctattcttttaactggtatatcatcagcatctttttcatcatcttcatttgcacttgattgttcatctgaatacttttttatatcaaaatttgaagaatgtgctgaagcataatctagttcatcgttgtaatcgataggttcctcaattgcagaaatattgaacggtttattatccggactgattccaacgtattcttcataaggcgattcataaccctctgtaccacttagatctagagtttttggattattatatttggggggaatgacaaagtcattttttttattgtttagatttggagtgtttgttaatgaattttcaaaggaatcaagattattggtataggtatcatgaattttattcaattccctttgcggactcaatggactgtaattcttatgtgtctctggtttaaatctgttagagttatttggagtcctctcattgatgtcttgatcatttagtaaagaatgtctttttacagatattggtggagaaagtacagattcactacttttggaattatttggttccttaactatagagctgttattgtttggaatgtcattttcaaaagttggttgattacaggaagatgaatttgaacccactccagatacactgactaattctttcggttttacagttggagacgaatatatggttggtgatttactttttaatctacatccggtataattatgtttagttatctttgttaccaataattggtcaattttttcattccaatcttcattattccagtgtgatgtgtcgttggagttaataatctttaggatatcttttacctctaagtaatagatagctggtaaagtaggcactgcaaacatcagggatcttggatcgtttctgtttgctattaattgtttgggtctaccatatagattaaatgcattcattgcgggtatcaggaatctgataatagtgtcatatgatgggacgcctaaatgcttctcagccataataaaaatgctaccattttggactgaatctaatgaagagtcgaacgaaattgtgccgtctaactttataatagtggagttatcaattaataatggtgaagaaggataaactgcatataaagcggtcgcttctgtgactgttgccatagcattcttctttgtaatttttttatcatgttcataaaatctaattataccgttctgagtattatgattatttaaattatctttgaaattgttcccattatttgtatgatgctgtgtatcatttctgttgtattttttgcttttccatttcaattctctctttgaggtggattgagaaatgaccgcataacaacgtttccatggcatccctgctccaaatctgacactaacccattcggagtaagtaaatttattatctgttgccataatattcttaatatcccccaatttactacctcttgacgaaagaaaggcacctgtgtaggcttcttgtaacgataagttttcgtatagggacaagcgaatagctgcagtccattcatggtaagattctagatcactgaatttgaggaaatatctattcttcaaagtggtagatatgacaaggacattttccaaatgtgaaaatcttttggatttatcatttagaataagtgaatcattggaatctattggtcttaatgttgcatcggtgaaattaatatatttaggttttgagacggaatttttaaaatttgaattattattattattgttgttgttgttgttattattgttagttaaatcatttgcgttccatagtgctagttgtgagcctataataacagcataatattctttccagattctatcagatggtgtaccgtcattcttaagatcgtgaagaagtagaatgacgcctttgtgatatcttctatgtgattgagcagtgagtaatgtgacgattggtaccaattctggagacaattctttattagaaggatctcccaagaaatatatatcatctgtaaatttaggaatattcggtgatgcatctgaattcaataatctttttccaaatgtggctgcaagagaccctatttttggagtggaagtattagatattgtagatgattcatctagactgttgctattcgaaccaatgttgtcacttttgttgtcactgtttgtattagttgagttactgttatgattgaaaaaatgtttagtggataatgataaacttgaagatgttgaatcagatttacttttagatcctgaaaagaatcgtttcatttttataaaatgatatatgcacgtgtgtgaataggtatattaaaatagtggttgaatgtatgatttaattgatagtaatgtttagtaatatagtatgttttgagtaatttaccaaggaaatgaactattcactattttgacctcctttctattttattatattttattatattttattatattttattatattttattatattttattatattttattatattttattatattttattatattttattatattttattatattttattatattttattatattttattatattttattatattttattatattttattatattttattatattttattttctttaattttcaatctttaatgcctttcttccgtttatgtttacttacttcttctttactagtttttgtttttgtttacagtttactttgttttttctcttcatttacaggaaatctcttacaagtaaacaaataatcaaaaaaacaaaaaaatttttttaaagggacgttgcttgaagcctcgagaatttcagaaaattgtgctaagacgtcattttttttttttgtttttttgtttttttgtttttttgtttttttgttttttgttttttgtttttttatgttcttcgaagctttgaatgttgcctttttcttttttctctttccaagatcagaaaaaaaaagggggagaaattgtaaccctaaagcaacgtcaattttgttttcctttcctttttcttttgtttgtttctttttcttgtttttcaaaaacttattttgcaacccttactaataaaaataaatttacgtataatgtgggtctaccctaacaatcttactttgaatcggaaaaaaaaaaaaagagacaattgtaatttgtgaatagtcgcataatatatagccatttgaatatatgaaaacttataacgaatttacaactccatataaattagcttatggcaggttagaaaaagctacgatactgttgttgctatcgttgtttttaagcttttacttttatttttatttttattttgtaatttgatatatggacaagagcattatatatgattagttgatgacttatgaacatgtcaatataaatctatgtacagcttatacttagcttggtaggtaggtgtcgaaagaggaatacaagcatttcttatgaattcccatatctttgtctcttggaaaagccttatcacctgtcaatcttcttagggtagaatagctactaaaataacattaaccaaccaaccaaccaaccaacagtaaaataattgctactgctaatggtgctgtgtctttttctttttttttccaattcgtttttcgtgtttttgttaaatttgtgacgcgtctttttctctatttttgtaaacgcgtaaacaccaagaacgcgtcagcttggtatggaatattatttaaattggaataataaacattatgtagaccactggagatggaaagaatttagtttttttttttacttttgaagtatatactgtaagatatgatagctgtgtttgtacgatctttttcttgttcaactatatcatcactgtacctgtgtcttctcccacttcttctttttcctcttcttctcctcttcttctaaaaaaacaaaaagaagattggtttcaattattattccatgctacatattttttcttttatcaaatcagctatatacaataaagtcaattaatattcaaacctctttagcaataaaaataatgtcatatcaattcccaccatcatcaccaatagtcggtgattttaataaagacaaagagcttcattttaaagggacttccatcccaaagaaattggaatttgaaaatacgaactataatgctaaaaatacaatcataaaccaaaataatagtggtgtccactatccaacacctttgccctcttcaagtataggtaatttgtcttcttccccaattaaaaatacagtacctattcagacttcttctccttcctcttctttcctttctccagtgaagaggggcaatggcgctaatattacatcttcatttatcttagaagaatctcctattaacaataaattagtgatacctattcaattacatcctaatgagcccgctacttacaaaattggtcgtcagtcaagcagttgcgatgtcgttctacctaaatttaaattgatctcaagaaaacatgcaattttgtcatattttcctggaaagaatcaattgaagttgacatgtctgggcttaaatgggttgattgtcgctttgccacgtcatatttcatgccatctaatgaggcgtcgtgacaaccaattcgagttctcttctaatgataatcttgatattgttgataaggaaaaacaattattgaaagaacaaaatttgacctcctttgcattaaggaaaggtgatactgttatattgccctttatgaataacacaattatcgactttcgtaatgtggaagtacttttgactatgaagcaactatcgtttcgtgatcatgttttacatgaaagagaaatttcaaaaaatcagatagattcagaagttttgaaaccattgatacaaacaaatattgtctcagatacaatatctccgactccaatcaaaccattaaaacgtttctctccattcctggaatcctctcatcaagataaaaagagtaaaaatcatgtgagaagattgacaaagtttgcagagcccaagagatccactgaagaaattattgattctttgacaaaacgtggcatagattgtcaagatttacaacacatcttagccaactacttggcctttgcaaatgtacaacagacacctttgtctttgttaagagatgctaattcacagataaaagccttgaagaaggaggaagtacgtgcattattagcaaatgaaccttgtattggtgtcatatatcgtaaggggaaagatgcagcaggtaaacctttagaagaagaatactactatgacttagagaatgatccaaaccaagttagaaaatttaatgttctatctattaaaggtggtagaacaggtttaagatcttgcaggaaaacgcataagcaatatttttggaaaaaaccagctaaatagaaacctaataatagagtaaagactgataaaaaactatgtatgtatgaaatcgtaacttagtttatacagtgttggaatttaatttaatgtatatgtaattgtatgtatttatgtataggtgtatttggaaagagaaagaaggagaagaaaatcatacagcggtgttctttttatgaaataaatatttaacatatttcttatattttgctttcattatctagacaattgcatgtttgtttaagaattcttgcatttcattagtatccatgtcttgaggatcttttgatgatatagcttgcaaaagaccatctagcatgctgtcaaccttagattcatccacttttaagcatagagctaatactcttctaaatttgccttctaagtccgattggttttcatgaatatcatttaatatagtttgtaaatattcgtcattcttcttataagcatttattcgtgtcttcagtaatgtggaggaaggtaattcatcctttattttgttgacatcatatttggatcgtatttgtttcataacattttctacagactcctcattcaataacttttcaatgtctccatgatactcattagttagcttagtctctaagaaatcatgaatcaaattaattctaaatggttcatccacatcaaaatctccagaatcccaatcaataccagcagtttcttctgttgaaatacctaatcttttcgattcttctatgaaattagtttcttcttttttgatacctttttgcaaatttattaattgttcttttaaaagaatgtattcgtcatttaactgtttcgcattttgtaaccgttctctggttagagcaagttgttttctttgtgaatttaattcctcatgcaatttagacagttttttcttatgttcagaaagttcatcttcataatcttttgttacatctgacagtaacacttttaagtcgttaattagactcatggtatctggttctttcattgagtctagtttgaaattggtggtggagttattcttaacatgattcacgttattatccacatcgtctttactatttttactagtatcatttgcaggaggtgtcaagcccttgtcctcggtataattaccactagcagctatcggtgtggcatgaatactattagtatgattgctattattattattttctgtaatattagaatcttttaacgccctaacaccaaaatcaaccggtcttaaaccggatttatttgcaatatatgggtctgctccgtactctaatagtgcgtctacaattcctacattacctaaccttgctgcaatatttaaacatgtgtcaccatttgaatcctgtaagtttaacatgtttactaagacccaatttaaagttaaatttttcaaaattggatctacatcatgtagatttgatattctatcttcctttttcacaatccaacccattaacacatcaagataatattttgcgactgaagaacaaccagcgacacctgatgtgataacaatatgatgtaaaacagttctgttcatattatcttcgagaatcagacatggatataaatagtctaatagttcttcaaaagttccagaatcgtaattgtttgctgatttcactgctttgacaagaggtgattcaccatcattgtcccctaataatctatttgatcctaatttaactagtgatttcactaagttaaggttggctatggaagtgagccaatgtaatggtgtgttaccatgttcatctactgggatatttagatttaataatacatgaggaaacatagcatctaattcttgtagcagagctttttcgaccaaattataggattgttcatttgttgagtaattattattttcaccagttgatgggaataacaatttttgtaagaatgtctccaattttagtctctcatctttgtctatagcagatgcagttgggattgtcttttggatagttaatggtacatttacgaagtttagatgtaaatcatgtttatacaaaggaaaagaactaaaaccttcacttaaagaatggtctaatttaagactcttatctaatttcacttttttcaatggggatcctaattgtctttgtggatcagtactttgcgaaaaagagtctgtatttcttttagaagttgtggagctggtcatagttgtggtggtattatggttgtcctcagtactactattcttatgtatattcgttattgttttagttctatttgtatcactagttaatttatctttgaatatatcataaagattagctttttttaaaatttgaatagctttttcaccggtaatccatttatcaccattagcatctgtgtcaaccaagacaccaaatttggtcaggagtaaattttctttatttgtatctattaaagtcatgtccttatttgttacatcattactatagtatttatgtaattttattgcatcaattgtaaatggattagattctgtttttgacaaattagggttaatattattataatcattcaattgatccaatatgggtaaaaatggtttcaatgtgatatatccatttcttgtatttcttttaagaacaatgcaggtgccatcattcaaatacccagtgatatcaacaaaagtcatattaattactaattagaggtattattatattgtgaagtccttaataaaactgatttataataatgccactatatatatatatgtatgtatgtatgtattttagtttaactttttttactacacgaagagacactttaattggttcagttatttataatttttcttcctaaagtaatgataacaaaaaaaaggcactctataatatcacgaaagatggtgttactgtcaattaaccagttgggtgaataatagccaactatgtacaggtttgtattatctctatctatgcgcttcttctcctgtctagaaaagttcctgtttttgaaactcttcaaaaattttccatattttttatattctttttagaaccgcacatttaaaaatggaggataaattgttaacttatgaagagcaagctattagtttacaatcaagggtagtgataggaatataaaaatatagattcgtgtggaaatatctactttatcttcctgattaagatgactattaatagggtaacaatagctagattattgaaaactgcaaaagattttgatgcagtcggattaataattataagttattatttaaggttatatcttgtagagaaaattttgaatgaggttaatagacctgaggagttgactgaattagcatctaatttgttagatagtattgaacaatttaagactggtgtgttagcgtctgatgataatgatggggaaaataatgttaaattgttaattaacgatcaggataaggcaaaggtatattttattaattttgcaatgaatctgtataatcaaaaattagaacaactgtcaaaggtcacggacaaccaaaataaggaggaaaatgttagtatcagtggtaataataatgttgaacaagatttaaagcgtggattttggtgttgtattgatctatttaaaacaattttgcacatgtggaattttgattctgtatcagaaaataatggtggtattgaagaacagcaacaggaacagcaacaggaacagcaacaggaacagcaacttatacagaaaagattgaaatattgtaagttgtacttaagtaagattgctaaagggaaattgaataataaggcaaatggaaaggttattgaaagttcaccagagactcttcatcttaaagaagataactataaggaagaacaatcaaattcgatagaggacgaacaaaaaaaacaagagaagaaagaaaaaggaggaaaaggaggagagataattggacaggaaactggtatatcaaatgatgaacatgatgacgatataaatgaagagcataatagcatagatggtatcgataatagtgattcgaattttcaactaccccctgttccaactgatgtgccagataggaaattagaattaataaatcctgatgttgatagtgaatatgaaatggaacacaagactttgggatatgaggaagaaacaaaatgtagcaacggggatacttccttggatggggttcagtcacatcattataataatcatcatcaatattctaaggatgaattggtagaaatgatggatcaagcttcgaaaatagaaaagatacaaaaattggctaaatatgcgataagtgcgttaaattatgaggatattgtcactgcaaaagatcaattaaaggaagcgttggatttattaaatactttatagcataataatagataaatactatagagagaacacagagaggaattcagttggaggaggtggtagataatgtagcatatttgcatccaatcagtctaatgcattgtgaacatttagagcattagttgactaatttatttatttattaataggaacatgaatatttttttgttgaaaaataataaactatataagtatacaatatatgcacatataaaaacaaaatttgaggtgtcggtatattggcaccaacatgataaatcatttgtacatgattagaaagaaaaaaaacacacaaatttatacatttaagtatatctttttcttttttttttctttcattctttcttgttattaagttgaattaataatattagtaaatgacaatgttcatctatgaatataggaaggggtgaaaggtcaaaatgaaacaacaatatggtgtttatctataaaacaaataatagaaaaaatgaatgttgaatatcaaagataagtaggaaaggtgagtgaggaagggggtggggaaaaaaaagagaaaaaaaaaaaagatgaaataattaaacaatcatcttttcatttaaaactttaaagtctttggtttttcccatgggtaatcttggttagtgaagtgaccgtaggaagcagttggcaagtagattggtctagccaaatctaattccttgactaagatacctggtctcaaatcgaagttctttctgataatgtcaataatttcttcatcagacttttcggcagtaccgtaggtgtcaacgtgtatagataagggctcagcaacaccgatagcataagaaaattgaacagagactctcttacataagccagcggcgatcaaggatttggcgacccatctagcggcgtaagcagctgaacggtcgactttggagtaatctttaccggagaaggcaccaccaccgacggcagaggcaccaccgtaagcgtcgacaatgatctttctaccggttaaaccagcgtcaccttgaggaccaccgataacgaatctaccggatggttgaatgaaatacttagtattttcatctaataattcagctggacaaactttttcaatgatttcagactttatcaactttcttagttcttcggtggagatatattcggcgtgttgagcggagacaacgatggtatcgattcttaatgggatccatctgccgtgatcttccttatactcgatggtgacttgggtcttggtgtctggtctcaaccagtctaaattaccgtgtcttctggcatcagccatagccatgttcaatctgtgagctaaaaggatggttaatggtaaaccttctggggtttcgtctgtggcgtaaccgaacataataccttggtcaccggcaccgatgtcttcgatggctttttcctcatggacaccttgggcgatatctggggattgttgttcgatggcgacaagaacgttacaggtcttgtaatcgaaacctttgtcagaggagtcgtaaccgattctcttgatggtgtctctgacaattttttggtagtcaatggtggccttggtggtgatttcaccgaagaccaagatcataccagtcttggcagcggtttcacaggcgactctggagtgcggatcttgctccaaacaggcgtctaggatagcatcagagacttggtcacagatcttatctgggtgaccttcaccgacggattcagaagtgaataagaaagtaccagccattttgtctattgaattgatgtatatatgcgtgtatgcgtgcgtgtttgtaaggttactgcaagagaagaggagtgattggaaaaaaaaaaaaaaagagagaaaagaaagacaaagatgaagtaccagagaagataggagactaacttgtcagaaaaaagcacagagaattcgtatgccctcgagtattttcaactttatatataatggtcatcgctagtgaaattatttggacgatcttggaagagatatttcctagtaggatggatatattggaattaaatgtgggcataacaaaagaaaaacaatcaaaaatagagaaaaagaagaaagagaaaaaaaaatttttttttcatctcatcggattttcctcataaacattcgatcgtataaaataataggagatggaaaataggtgaatacaaaaataaaaaataaaaaaaaaacaatttttttttatttttcgggctaagaatgtttcgcctatttgtggtaaaaagaacaaaaagcgtgaaggtttttgatgttggtggttttttttaaacgatgcagggtaaataatcttgtttttctttttttttttttggtccgttttgtccattttagtttggaagacaccgataaaagttgaagtgaaagagataaaccctatcttctacatggacatctatacaggtaaaatatggggtaccctaacaactaacaacgacgtgttgttcattttactgtttcttccacgtggttttctgggaataaaaaaatataaggaaataaataataacgtgagactttttcttggattctactgaacagtgattttgtgtttgacttcaattgttgaataaggaatagtaaatgtgacctgagaggaagtcacgtgtgcttggtctggcttatagtgttttttcacgaaaccctatatttttttagtgtctatctgttttttttttttggttttttggtttttgcttttgcttttgcttttgcttttggtataagcgtaagggaaataaattgccgagaaaataaaagaaaaagactaaaacgaaaaaaaataaatgtggtttcccacagtttttgtaaaatgttcttggttttctcaaaaaaaattaaaaaaactgtgtaagtctctaacaatagaaaacaatacgaggagaataaaaaaacaaatgaaaaaaaaaaggtttgcttttcttcttcaaattgtgtaagtcctttctttttttgttttgttttgaatttttttttattacggtgtttaaattttgttattgaaaaaaaaaagaaaagaaaagaaaaaataattatcgccttccacagaaaatgtccagtaaaaaaagaaaaagaaaaagaaaaaacaaattcgtttgcaaaactgtggattacgtgcttttgtgtcatgtggtttctgtggcaacccaaaaaaatttactgtttgttttttttttctctttctaatccttccccaccccctccccttttttttttcttttttcttttttctttttggtaatattcattgatttatttttatgtcaaattctgacttttaatgtcatttgtacaaattatagcatattggtatcctttcattacgacatattgcagcagcaacattggtttaactctatttaaacaatactatatatatatatatatatatagtaatatacatacatctttaacccagcaggttttattagtagttttggtttaactaataaaaatgaagagtttattagaggttttgaataagcatgaggtgattaaggatctttttccaaaagtcacaaatcctgcaagcttgtctttatctgggactctatccattgagtatccacacccaaatgtcgtggtcaatcaaggtaacaaattgtctcctaaattgacccaagaagccccaaaagtcacttatttggctaacaacgactttccactaaatctagataagtgttatacattagtaatgacagacccagatgctccttccagagtagaccataaatggtccgaatattgtcatttcgtccagactggtatcaagtttcacgaaccaactggcggcttaataactaacggtcataaagtagtcaaatatatgggaccaggtcctccagctggcactggtgaacatcgttatgttttccttttgtttgaagagattgaggataatcatatctttacttccattgaagaaagagtcaattggggatatggcacacctgccacaggtatcgaaaaatgggctcttgctaacaaattaaaattgttggctataaattttttctttgctgaacatgactgaacgaataaaacagtgttgtgttatgttatatatggagttttctttttttgttttttgttcttttttttcgtcgtaacgttgacgattttttgatttgtatatatatatatacagtacagtataattttatctatgtaacgtatgtaaaaaagataaaataaaagataataataataataagagaaccaagagaagatagaactaaacacagttatatatattattaaacattgttaaaaacttgaatctatttcatatctttttttctacctcatttaataaaatatgtattcatttacaaaatacagaattaagtattacaaattatggttaaaaatattatggtaacgtagtaattaaaaataagaacaaaaaaaatttttttttaaaatatctatatataggcacgtccatacgtatatatgtatgtatgtatgtattatgttcctctataaatgttggtatgtgtctgtgtttattttcttatatgttttgatctggtttaataattgatatctcctaattaagaagaagaaggtaattaagaagaagaaagataattatgaagaagaagaagataattatgaagaaggagaggagaacagagctttcactaattctttataaacgccaatttggaaatcatccaacttcaattgattcaatgctggtgctgcaaagaatctactagatccattttgttgcaaatttgtgtcactcaaatcatcgttaatgtaatgcggcgtcatttcctgatacatctttaatttatgttgttgattatcacaatataatttgtctatattcaaattgtttggtatagcacataaccagatacgtgtcttataaaacttgaataattctttgattaattctctaaaatcattacgttcttcacatatataataaaatgttaatttctttctatcaaattggaactcagcattaagtattttaatgtttaatttcgtactgttgctgttggcttctacagcagtactattattggcattattagaatttgttgcagatgatgatgatggcgagtcatgattatttaatgattttaattttagttgtgcaatatgtaatgctttcaattcatcttgaaatttattatgtaaattggaactgacttcccatggtgtggcaaatctgactatctgtttagatggaactactaattgaattaattcaatgacatcgtatagtttagggtctaattcatcagttaatctctgtgtagcattgactaaagcgttaataaacttactattaggataatgttgatctcgatttgtaatcaacgagtcaaaatggatttttttctttaaaaaatttatcattaatgccatatctaaatttataactggttctactactaatgccaaatccttaccacggtcaccatcgataatgatcagatctccacgttttataagtaagttactattcgatgggattgataataattctaatttaccattcttcaaagagactaacactaagggtttataatgtaagtaagtggatgtggaattattattactattagtattattttgaattgatgcattgaatagtcttttgccaccattggtcgaaacagcattattattattgttgttagcagtagtgtttgtactacttttggatataaaggtatcagattgtgagttataacttaaattacagctctttaaaaatgataaaaactttgagactgactttttaatagtcatatattcagaatctttatttttatcattgttattggaatcgatatttaataaacctttaatataatcaccaaaattatagacttgttcacttgaaaaataatttttaccacattcctcgtatattttttgcaactcagaagatgatgttaactgtcttgtatttaataatattaatccattatcttggttattactgttgttatcgttgttgtgattcatattattattactatttgtcgttatgttattattgttattggtagaagaagcattaacgtatcttgtattattcaaataattcaaataaccatattgattattcttttttgaattgccattggtattcttatttccattcattgaaaataaagcaggttgtgtgtttcttctttgattgttataattattcattattggattagtaaaatcagtattcatactaccgatattattataggtttgttgtatggtggtgacataccgctcattctgtgatggcatattggacaatttactatatgggtacccattagtatgtagtttagtatcagaaggattaatattgttggtattattgaacatttggctcaataaggtagcaggactccgtagacaaacactctgcggtaataagccattatcatttgatctttgtagtgtagcaatgctattagaattattattaagttggtcataataattaagattaggattattttgaataagattagaattatttctatttggtatcatttgggtataatcattctgactgttaaagtgataattatttaatagtccactgttgttaaccatatttggatcaatattatgataattactaatgctgttattgttaccataattatgatgaatcaaagaatcagaaatgtaagaagatcttctttcactagcaaagagagtctgtttatttggtagaaacaagtcgccagcacttgtgatatttgaattcatagtattactattgttggcagcagcaatgttagtagtggtagtattgttgctattcacatgattactagtaccattaaaattaaagttattaaatgttaaaacaggttgaccatttgaagttgtcgtagcattagagttggaagaatttacaatgattccgatgttgttattagactttttattaatttccgagaaattgaagatagattttcttctaccattagattgggaaccgcttttaacaatattattactaatgatattactacgttcatatggcaaaccagcagattgaaacatagatatatcgtaattacttgttggttccatcgaattactttctgattcatttggaatgatctgtaaagatgggaaagtcactttacttacccttttctttggatcaacattttcaaattgttgctgtgaatctaatttagttaaaggactaaagtgttcattacctattaatggagaatggttagtggttgcaattgtggtagaagaagtggaagtagaagtagagtttgttgtatgatcatgattgttgtcgttatgattaaagcctttgatgaagtcaactctgttagtaatatcatttttatcaaatgtactgttgtcgttattgggattaaattcatgttgaaaatccgtcaaagatttgttactaccatttttaaataataacttttcataataatttttcaatgcaggattatctgaaatactagtagtgctactgatagaaggtaattccattgaatccattgtcattaggttgaaaattaaatagaaggtaaattttgtcaaaaagtaaaaaaatagagatagaatcgaaacaattgattagtagactataaacaagcaaaaatggattatatcacagggtttaggaattgtagtaaataatttaattaaaaagataaataaaaaataaaaacttttaatgaaaaaagagagaatagttaacacttgatgtgattctcttagtttaaaatatattggagaatgcaaacgtttatatagattacggttacgtatgcgtaggtaggtggataaacgtcaaatagaggagttgacagcaataatagtattcaaagcgattgactcaagcgttagtttttttcaaaaagatgttgctatcagtctgtttctcgaggaatgttagttttatcttgttttgtttattggaaatgttatgcaaggaaaaagtttcttgtaaatttttccctctttaatttctctattttttctggtaaggaaagggaaaaaactatttggcggaaaataaaataacgtacgaattttctgagttttaagtagccatctatattccgatagtgtaaagttataattccgttccaaattccgtaacgcatcctttgtgaatttcctcttgggttttgtttttccttttttttatcttttttgctgttttaggtaaagataataaattttaattgccttttcggatttttttttcgttcttattttttgtttcttgttattcgggaataataagggagggaagaaagattagggtgtatatttcagggttcgatttttattagtgtcatttagattgatttgatgtaattttcgaaaatgttagttattttattgaaaaattaatcaatttgtatagttataaaaaatatgtggaatacaatagtggtatttttgtatatttgttccctttcattaagttcactaccaattatttaaaagttaaaaaatttagttaagttatcttatttttctttattaaaatgttggaatttataagttgattttattgatgatgttgttctctataattggttttattttattttagtttttactagaagaattttttttttttgaggacaatggactattatttgtaatgtatcctaaatcttagtatgagaacacattaagcaaaaggaaatgaaaaaaatttttttttagtaatgttgagaatgagcgcctttattcattggatatatagtaaacattctcaatattatattaaacagatttagtatacaaaattataataaagttcttcactttctttctctatatacaacatagaaataattatatacaaagattgtaaataagataaaaataatgtatgatgaaatccttggctttatatatgttaacattaagccattttcctctacgaacagtaagatatttaataaacaaactcaacaacttttggtgacctctcaacaattattactcaacaatttatcgtttagtgtctgctaaaatcttattgttctatctattttatcatagaacattctatttcaacaagtaaatatataataattgctcatttgtatatattactaacaggtagtagttgaaaatgtttgcgagtgctcatgtgtatttccaatgtttatcattttgcgaggaagaaaaagatttgtgaaaaatgcaaaaatgtttttttcttttggatccacaagatacaacaaagtcaaaacaaaatattaaaaaataaacaattacaaaattattactagcattcattttaaattaataaaaaaagataatataatttataacaagatgtcggtaatgttattagttttagctatttatagtaggatattaatggtactataaattattattttattgcttaccttattttgttctacatactaaatatacatatataactattatacactatatcacatattattttaactcttcttttgtaagctattataaaattatcaatcatttgatatagataatttagattatcacatacatacatctttaatcttatttcaatatttttacattttttgaggtcaaaactctgccaaaaatattgcacaataaatatagaatgtaaactaataataatactacaaagaaaacttttagatattaccaaaactctttccaacgaataattgaacttcttaataatgcaaaaaaaaaaaactacaatcttaaaattatgttaacttaatatctatcaaaatctcaggaaagaaaacaactaagacaaaaatcaaaaaaaaagaaaactgattactatgaaatgtcataaaatattttagtcagtattatatcttttatttatttaatttgaaattctaaataagatcattagaaaaaataattaaagaaaaaaaaaaagatctagtacctttatgatagaaatgtatatattttcccaccataaaaaatgtgttcatttttacattatcatctactttactaagtgaaaatagtattattctactaataaaaagaatgctgattttacactatgtagtcctacccatatatagaaatagtttagagttaaaaaagcaagacataattgatttttatgcaataacaaatgactctcactccgcaaaaaaaaaaatttgtggtcagattatagctgatttagtttttccttattttataacaatttgataataattatcataattttgaaaagaagaaaaaagaaaaaaaagaaaaaattaataatgttaatcgaattctgtcagattaaaaataaatagagtcaatctgattctttttttttttctttttcttctttttcttctttttttaaaagtaagtaattatcaatcagtcaacaatattagtaactaaaaaaatttctgaaacttatgacaaaccaagatgcccaattgttgtgccgatctctgtttccaacaaaggttatagactaaagctagaacaatgtgagtcatctctcctacctgaaagaacacaagaataaaaaattaaaaattaaatagcaagaaagaacgtacacatctaattaaactatcacaaaaaatgtaagatcattagtatatataggtgcgttagtgtgctctagaacttttccattatctcaatttcttactatttaaaaataacatattttccaaccctaacaagttttctttcatattctaactgttattgctatgctagagttaaaccccgatattgtattttaagtttttcattttgactctggccaacaaatttccttatacgggaattttctaaaatatattgcaaacttctctcacaattaaataaatcagatttctccttttttttaatttttttttgaatactaaaaaatttagggttttaagtgaaatattttttttaagtaaaatgaactgcttaaaatactaggttataagatattttaggtaatattcctacaagaaataaacgaaaaagactccattttttactaactaagccgagtatcttatttttggaaaatagtgcattagtttgcaaatacaacgataacaacagatacaattatcatttttgcatttttacaaatttcttaaactgtttttttttttttttttttttttttttttttttgactaaataccccctgattaagtttaatatatttttattgctatctcaatggatattttttgaaaactttttttaggttaaacactaaaaggaaaaaccaaacaacgtaattatccttccatggtaccgcccctttcctcattttttagatcaatgattaagagattgaattttttaagaaattgtgaagattataatatttcagactcattatataattcgaaaaaaaaaacctgaaggaaaatatacacaatatctgttgtttgtattatttatttttcgatgccgttcaataaaaaaacaatagataccaaggcacggctctgaatttttttaaaataaatattgtatgtatatttgttgtatcaaaatttacaggagtctgtaaggagtgatcaatgatatttactgataagacaaatttccttatctaaaaatgcagctttctggaaataatagataagagaaagataagaatatgtgtggggtaaatgaaattgataacttctcgagtaaaatagcctaattactcaccgcaataatatcgagaaattatttatttactcatcaaaacacctaagtatttttttggaatttgaaattttagaaaaaaaaagccattatatctcaccacatctctctattatttgccagtaaccccaagaaataaaacttatattcgaggtttggccaatgaaaattatcatattctttctgtgcccccagtactgtaaaatttcccctggtaaatactttttattttctcttttttgcttttcacttttcatctttttcttttttatttttttttgtttttatttttctattcttttctcttcttcaacccacttactttcacattttttcgaattatacaatcgtcattaatgagtgatgtaaattttttttgttgtaattacgagaaaattgattagattgaattatataataaatcaacttgcctttattttatttaaaagaaaaaaaaattgtatatatataaagtctccattttggacaccgttgtgcatcccgcacaaaggagattgaagaagggaactacagacgctgaaatagtggatattatgcatgacgatcttcttgtacgtcttggcaatttctctctcttccaaagtttccttctgtaagtctctacttcttagtcattctttatatatataacgctacatcttactcacggattgggctctaacgttttttttcttttcaggatcactatcttccttttccttgttatttcctttcagtatctggagaaaacagatataatatagtccaacaaacaaataaacaaacaaataaaaaacataccaagttgtgtgtgattatttaatacattcttttctccgtgtgtatatattgattgacttatcaattcattaattattactttccattgtgtagcatttcttttttttccccgactatttttttttcattcctttttttttttttcaaatttcattttttcctaatagacgagattatattccaactcatttgccaacatttttttgttagcattatttgaaaaactttatttaacagcttcatttgattcatactttttctttcctatattttattatttaatatttcaccgttctctttgccactaataaatatttgattatcctatattgttagcaaagctagaaaagtcgttcaaatacaaatatagatatataaaaaaaacaaaaagcaaataaaattatttaaaatgccatcctctccaattggtggttctgattcaagatttgaattaaaagacttgaaaaatggaacaacagaaattaagtccactgaacaagaaaatgaagttgaatattttgaaacgttgaaaaatagtaatggttcccaaaatgattattcctattctgataataaacctgtctcaagatttagaaaatttatcgattcctttaaaagagcagatgatcctgttcatgatactcatggtactagttctgacatggatattgaaatgggttcaaatgaaggtgatgctgatatgattgtagatgctatggccaaaaagacagatggtgaagctagtaatgatgaaactgacaaaaagttgaaaaagactattaaacctcgtcatgttatcatgatctccttaggtactgggattggtactggtttattagttggtaatggtgccactttgtcccacggtggcccaggtgccttggttattggttatgctatcatgggtttaatggtttattgtattattcaggcatgtggtgaaatggctgtcaactatttgactttagttggtggatttaatgcttatccaagttttctaatcgatcctgctcttggattctctgtcgcttgggtttattgtctccaatggctttgtgtttgtcctcttgaattggttactgcttctatgacaatcaaatattggactacaaaagttgatcctgatatctttgtcgtcatcttctatgtcttaattgtgggtattaatcttcttggtggtgctgccggttatgctgaagcagaattcttttttaacacttgtaaatgtctaatgatggctggattcttcactttaggcattataatcatctgtggtggtgctggtaccagtggttacattggtggtcgttattggcatgatcctggtgcatttagaggtgataaagcaattgatcgtttcaaaggtgttgttaatgttttcgttactgcagctttctcttttggtcaatctgaatttattgccatcactgcttctgaacaatccaatccacgtaaagctattccatccgcggctaagaagattatttatagagctttatgtatttatttggcttccatcatcattattgggttccttgtcccttataactctaatcaactactaggtacccaatctaacggtattaaagcatctccatatgtcttagctattgctaaccatggtgttagagtcgtcccacatttcattaatactgttattatcctttcggttttgtctgttgcaaattccgccttttactctagttcaagaatgttgttaactttagctaaacaaggttatgcaccccaaatctttacttatattgacagagctggtagaccattaatgggtatcttagccgcatgtttattcggtgtcattgccttttgtgcatcatctccaaaggaggatgaggtcttcacttggttattgtccatttctggtctatctcaacttttcacatggatgtctatatgtttatctcatatcagattcagaatggctatgaaagctcaaggtagatctcttggcgaaattggttatttgtcacaagttggtatctgggggtccatcttttcttttaccttgatgtttttgattcttattggtcaattctgggtggcccttgcaccaattggtgaaggaaaaatagatgttcagtcattctttgaaaattatctagctatgccaattttaatagttttttactttggttacaaaatctggaagagggactggagattatatattagagcctctgatattgatttaatttatcaaagacatatttacgatgaagaagtgttaagacaagaacaagaggaatacagagaaaaactaaaaaatggcccaaggtggaaaagatactgggctttctggtgttgattgtagcatctgaatcttatcctaatttaatgacatttcatccccgtaattaattttttttttccatttatacctatatttttcttcatttttttttttatattattattcctctgcattctataacgtttatccccttcctgcttccatgaaaaactgttggtaaattaaatcggctcatattagtcttacttttttttttcattccatccacctcctaacgtgttcttttattcatcaagacatttatatataatgttgtaaagtatataacaaccatttattcgatcacattcctcttttgtatgtatctgtagattggtagatttgacagtttttctactatatttgtaaaattaacttttgagtagatgagttgtttcatgaaatgtattagttctctaaagttcttttaacataagagttactggagtaaggagctgtttgagctctattttgaaaattaaaaaaaagaagcgatttggtcataaaaattaatacacaaataatatcatactgagtgacatcaataggaggaaatctacaatattcaaaaagagaataatgagactatcctagaaaacaaatctaagacataatttgtttgatgtttacttattttttccccctcttttcttttttgataaacagtaccaatttccaagttatcagatcaataaatcattctaatgataacagtgatatagcaaaagtggtaatacttaataataagttctgattattttatattttaaaacttacaagtaactttttccattttcttatgtccaaatctacaggtccctattttaacatatcttatggaaaaatatattattcatcaactatagacttaattataaaaaataaatgtctcttttccaagaacctgatatagttgtatcttctatgccacaataattaaacaattactaatcaaaagacttctgccaatttatgacgtttttcaattactcagcataatgaaataaggaaaaaaaagaataaataatgggaaaactctattgttttgttttctatttgtatgaatcccacaatagaaaaagaacttctttttacgttacaaaataaaaaaagaaaagaaaaaaaaaatagaaaaatgatctttttaacaaatacattttaatattgagaccactaagttaaacgaatcagtaaccatggcatactaaattgatcaatatacaaacagactatcaacaagatggaaataggttactagaaaagatcaataattattttttaatttgtgtctataaaatctgcttattaattcggaaaattcagtaatggaatgaaccacctcttataagtaatcgaaattactgctgaaacactatattataaatatctgtcactttcatagaaaataatatatataagaacgaattatagaagaatatatgagatgtttctatttgcttataatactgtaatccaatagttctttttgataaaaatgacaaaaaattataataataaaagtaaaaaaccaaatcaatagttcaaaaagccaaaacacaaataaaagcaatgtccgccattactgccaatttcttacatactttctcatcaagacgtacaatctataaacttaaaccagaattaccagcaggtatttcgatttacgatgttcaagccactatacaaaccataataaaggaatctccgaccgcgttaaattctcaatgtaaccgtgccataattttaactggcgactctcacaagaaagtttgggatcatgtcactaagtctatgcctaatgataatgccaagttaagaccacaatctgttagagatgaagcgtatggatctgtaatcttctttaccgatgacgttgtcactgaaaaattacaagctgaaatgccacaaattgctgaggtatttccagtttgtgcatcacatgctactggtggtgcccaaattgtttcatgggctgctttagaaagtctaggtttaggtgttcacattcagcattacaataaccaaattaaagaagctttaccagatactattccagctaaatggactgtagtggctcaattatgttttggtactggtattgaagccccaccaactaaggaatacaatgataatccaattgaaatttttaactaatcactttaaaaaaataaatttttttcagtgtatattttaccaatttttcgcatttgaattctttccttttttgtttttaatgacttaagctagatctatattttcaaaaaatatgttttatcttctctatttcattttatgtaaatcttttatacttatagataattaaagtaaagtattttgattatgataaacctaattttgttgaatacactaatcgataattctagctacctattccccgaaaaactgaataatttcaagcgtctttctatcccataactattattacttactgatcctttcatctacaagaacaatcttcgaacgaactaagataatatatgtttacaaaccaaacagtttctcgagaaactcttttctatcttctcttctatttaaaatgaatcttccactatataaaaagtaacgttacattagagacccacaggactaatctcctcttagtaaaatattgcttcagtttagccatatctttaacttttctatcatttccaacaccttaaccagaaaaaaagttatttctgttgcattgaattttatttccggccatcgagaaattacgcatcccaagaatttgaaaggtcaagagtttgaggaatctggtatgcgataaactaagaaagatcataattcaacatgttctcgctgaaagaaacagcaaagcacaacaaatcgtaattaatttcatgtgtgattcttcttattttttaatagaaggtcaatattattttaattaaattttaaataatatacatttcttgaattttcttactattattgatgttcttattgctaccgtcttttcttcggtagtatcccttcgcgaatctacttgtgtaactcaagtgagcacaactactagtatgtatgaacaaccttttctattttctcctcttgagaaataaacacatgatttatcttattttcagatctattaattaaaaacaaaaactacgcaacaatttattacaagttaacactctgactgactagtttacttgactctgaatgtaatgttaagcctgcaaaaacataccatcttctgtaaatgaaaagcttattattcaaccattttctttactaatgatgaaattacagaaaagttacaagctaatttccttaactggactaccatttccccacaaattattgactatatgtttgatgctgctcaaaccttatcttgagttacttaaaaaactttagagtcgatgcttttttacaacattacaatggatttgttaagattgttttgtcagaagaaacatcatttggataagttattattgctgaattatgtttcggtaaacctgcaaaatcagataataaaaatacatatatttatcataaagttaaaatcttaagatagaagttgtacttagtggacttttgattactcatttaaatttatattagcaaaatattcctcctctacacatatattacataaaaacgtaatattactagaaacttagtcattttattaaaaaaaaatcatcacttttcaatatacttttgtttgaatgtttcctattgtcaagttttatatgtatgttctacaaaacaatatatacacataaacttgttttaaaaattcattgctatgcgcattattttttcaaaatagattcagttggtattatccctctatcatcatttaagtattttctatcatttctcatttgattaccaaaattgattaatgatttagatgtgccgtctatagtacatttttccactaaacaccatttattatcttcataaaccacaagaaccctcacatattcccccatagataatgaaatttcatctattaaccgaggattatatggtcgcacaactggatatactctacctacttttagtaccgtattaaattgattattacccttgctcttttctttatctaaaagcatgtgataaggtatctcaggtagttctttttcgtaactttcagctttaatatttgcctttttgaagttagtcctttttagaggaactggttcaataacaattttggagtttgcatcaattcgattactgtctaaaacttgttttttaattggataattagttagtgcatactttccttgaattggtatcttttctgaaatagtatccccagtcgatgaagaagaaccacataactctgcattcgaattagataagttaaatacattcacattatgagaatagatggaacgaggcttattcaacattggagatctctcattttcaaacccaacaggttcatgaacataatttttgtcaattcgactaagtatcttaaggttctttaattgaattgttggtgttagtcttggaagtaaattattaatcttttggtatactgaacttctgtgagtttctttgtctagaaatgagttatcgactagttttgaagtaaaattctctgtatctttatcctcctcacagaaagatacattagggtatttacaatcatgatcataatcgtttccttcatttcttttgtttatagtaaactcaacattaccagtaagaggaaaatgaggtttagaaacataattgcaggataacttgtcgagtagttgcagtttctctcttggatacttactgtgtacatcttttggtgtttgtacatgacaacttacatattgtttgcaattatatgggtctattccaattttatactgaatctgggattcgcttacatgataatttgaagatttataaggacttatcctatacttcttttcaatgtcattattgtcttttcttctatgaatacaattaaggttaaaaagtttatcaaaccatgtgttggctggttcttttattgattctgacggtgacactggttgtactgacaataaaatagaattcttaataaaataaaaatatactaagaatatcaataaactgaagcaaaatatcccaacaggtaatccaatagataatccaataatcttccccgatacatctttagattcagttgaaaggtcagttaattttatacgagaagtagaagtagagatactttgctccgttgtaggtgacaggttaagactatacgtttgacttgcaacattttcaactacgtttcccgtcctctcatgataaacacacctttccgttatcattatttgtgtttttaaaccataattaatccgattcaacataaccaatatttagtttaaacgttagataaaacccaaaatacatttaatcacaaacaatgttagagtaaaaaaaattaatgttactttcaggtcgctgtcactaccaacaacagcatgtttcatacaatatactcctattgtatgtcacacatgccaactctatttaaattttgatggtataattaccaacatatatgtgtacctttatatatgcatatttatcttaatacatcttaagtatatatataatagatgtttaaaactctttcacttcttccatatttcatgaatcccaatttgtttcagacctgtttcatgttggatcacatagatagatcaccattatccttctatcaaacatgaaaaataaatacagagacaaatataccataaatcacctcttctgctctacactccatgtataatttagatacatccatctatggttgcaatatcacagttttttctccttcttataagttcttcactattcatatacttagatacttctccataagtgaattagccaatgctgtattaccactctcctgatagatattaatacaattaaatgctgcatgttttttcagtttctcatcttcataatcatttaaaaccttactataatatttgatagcaattgataccaaacctattaaatggaatgcacgaccaagattataatctgcctcttgtttttccacatcagtatacatagtatttctaatatcatagtaacgataaagataacgtaatccatgtagtatctggaagtgcctagcagcggtaagtctttgcattgaacgttgcatatgagatagacccaataaaagattaaccgtagggtcatctggaatctcattttctaattgactcaaatattgaagtgctgagaggaaccctctacttgaataaagtaaaacagagtatatatagtagatatatggagatggtttagcctctggattatccactacatcgttagtaatagatgcttgaccccttacatgaacattatatctaacagaatcaaaagctttaattaatctaaggaaaaatttctgttgaatggtagatgtcaatatgtttgaagccaacttgccatgcgacaatgaaaacataaacagcaataatatttttctattgaattgatattgatttaatagtaaccttagatttgctaacaattcctcttcatcatccaagtgtaaaactattgcaagtctaacaaacttcataattttagctctcttactatcttgaacaaaaacattaacttcttgtgctgtatcaatcacactcaaaccatcttgaacacttctatatttagtaattgtcaaggctaaatccataaatagatcgaaccattgatcataacttaaaccacgaagttccttagtagatgttaatgtcactctttcttccattattggtaaagtatcagaaagtggatcaccttctgataaacgggataatctttctaattggtaatcgacgactgtatgaaacttcctggtcctcctaataatacctatgaattttttagatctacttcttacgaaaaagtttttaacagaactgaagacatcgaccagatctgaaactgttcttatccactgactgatttgtgcgttattgttacccgcaatatctctttcataattttttaaactattatacttctccaacacttttaatgtaatcttcttttctctctccgccttttcacgttcaatatcttgcagtgttttcttctttttaattgtataagtcttatacttactgtcttctagcaatggtttactactgacatctctatcatctaattggtcattccctctaccctttttttctaactgttctttatccttttcatcaaccacaccataaagttgagccttttgtctctttctgataactgtaacttcatttaatatacttttgaagatatcaacattacctaaatgataatgaacttctgccaaacttaatttatgttccagagattctggatccatttcaatgattctctctaaaaattgtcttgccgtatcatattcttctgtttctttataacatttggctatattctcatagaattctacagtggcataatctgggagagataacaagggcgccagaaaatccaaggcttcctgaaacttctcagctttagttaatgctacaccgacttcataatttaaatcagctacatctgagaaattttcatcatataaaaattgaaaatgattcattgcttctacaaaattttcagtttgcaatcttaaaagtcctaatctgactctaatatcaatcggtaaaacataggatttagacttttcttcatcaggtaatgaatcaaatctagtgctttttaatcttctactatcaaattctgaatcatcaattgcatcatcccaaaatgtctgtaattctcgatgttgtatccaacgggcacatttcttaatagtccttatactttcattatttttatcaccaagttttaaagacaactccgctataatattaagagaagaccaatcaaatggaatacatctgtattttttattaattattttccagttaactccaaaatacagtttttgctcttcctcatacatttcttctaattcctcattatcgatatctgattcagaattattgtcatcatctgaaagttctactgcattttcatttgcttctatgatagcttgccgtcttttgacattcatttcatacacatccatataaagtttgatagcttctggtattttattacaatcaacatttaatatggctaattcacgtaaaatatttgaatcatatggattattttcatataatttttcaaagccttttaaagctttccttatttgacccattcttttatataacagtgctctacgatacacagactcccattcttcattattaagacttatgactctagagaaacaataaattgcttgtctataatgttccaaatcatacgatagtatagctacaatcttccagaattcccaatcagaagaattaatatgtgcggccaagaaccatgaattacaacaatcatttagtcggccttgaagttggtaaatatcacccaacgtttcgtatgcagcgaaatttctgggatccttcttaataattttattaaataatctttctgcagtaggtagattatttctcacaaaggcttcattggcttcagataataattgagctacttctggatccaccggtctttgtcttctgaatttgtttttacctcttctattttttttcttaatgttaaaattattagcttccctaatagcatccatgaaatcaccttcatcttcatctgaactaccatcatagtcagaaaactctgctaataatgcatcatcgacaacatctgagtcaacaaagtcatcttcgttattataatctgaatttccgccagtgattccattagcatagtctgacgcatcatcacctgaatttcgcttgtctgtgtctattccataattattctgtttcttattagtattttcagtagcatcatcagaactatgaccgatcagatccctcaaatcatctaaattgttatataactcttcttcatcctcatcgtattcaaattcatatttattgtcatcattattatcaaccacatgatcattattttcagcaccactcatagtatttacaccatcagtccgtccagcaacaccttttgtctcttcggaaacaaaatcagctccactgttattcatagaagagatagattcatccaaatctaatgcataatctatcttatttcttgttttccgtacagatcttctggttcttcttcttgtagtcattgtcttttacgatctgacaaatgccataagatatatgcataaatcagcctagtttatacgcaaatgttctaatatataaatatgtccaacagtcctacctgatcaacaataccaagcaaaagtatcctcttccactccttaccttgttgtcttagaaactgtagcaatgaacagtgtcagcatctttttctcttcagtcctttgttttagaagtactctatcaacttcaaagaacttttggccctaacaaaacggaaaattcacgaaaaaaacaaaaaaaaacaaaaacggctgtcagaacatccagacaccctaatatttttagggttttgtagaatttctcttttagggcttgaagacccttttttttttttcttttcttttgctttagaaatcaggaaaaaaaaaggcaatagagtgaaagtttcatttaatgacagagagaaagtgtgagtgagtgagtgagtgaatgtagtggttgatttgattgaaatagatcaggaaagctatatgcgtaggattgtctgataattattaagacatgggtcttatctcagggctgctaattttttttcgttttttgtttatagatcttcttcttcttgactcttttccatttcttcaaatcaaacatttgtagcttatttgaaagaccctgagtgaaaaaaagttgcaacgttaaggtacaaacctatataatctacaaaccatagtttcccatattttaatagcaagcacctattcgccatgttttccgggtttatgtcaaatgtaatggccaattccaacaactcgttccaatcgttcatgtctcaaacgtttgcggaattatttagatgctatcctatcacaatgatgaacgatagaataagaaaggatgattccaattatggtgggaagatattcttgcctccaagtgccctaaataagctatctttactaaacatccaatatccaatgttattcgaattaactgtaaatgaaacaggtaagtcgacccatgcgggtgtccttgaattcactgcagaggaaggaagagcatatttacctgattggatgctgaaaactttaaacgtccaaccgggtgctttactaaccataagatccactgaactaccaagaggcacatttgtcaaattggaaccacagtctgtggatttcttagacatctcagatcctaaagctgtcctggaaaatgcgttacgtaatttttctactctaactgtggacgatatcatagaaataaattataataataaactctataggatcaaaatccttgaagttaaaccacaaactggttcaaatagtgtttgtgtagtggaaactgatttaataacggatttcgctcctcctgttgggtatgtggagccagactataaatcaactgcaaaggggcaaggcccaaacgattcacataacaataatgtaaagaagaagacagcagataaattcgattcaagtatcgtcaaggaagggtctatgtctacaagaataaattattctaagattgcaacaagtaacaatataaaaaatacaaataacaattttattggacatggagaaagtctgtctggtaagaaaccaaataaaataaaaaataatacagaggaaacgacatctcaatctttaaatattaaccttgatggagaacctgcacgtttagatttaccaccaggccaactattctttgggttcccaatagttttgcctaaattagatacaaaggatggggatgacaaggaaaatccatcatcaaacacttttcaaggtcaaggacaatcattaagaaaagcaaataaaagaaagactaaaaaagatcattcttcttcgaaagcaaaaactccaagaagtcctgaagtgattgaaatagattagatatatacatcaaccttcactaaaacgtactctattaaagagaaatcataaaaggaatgcagtaaacagattatttatataaaaattacatattcactgtatttacttcactattatggatttaatatataattaatccttttgtaatgaccatgaaaggtaactatttacagtgtggttgatcggtttcataatggtttttctttttattttgtgaaaacctttcaaataaatataatattaaaagaatcttttttcatataaatcaaaattaaacattctataatcatgcacaattaatatataacacaacaaaagatacatcattccagatgatgctaggcgttttattaccggtgatgtgaattgtaatcatatttaggtttatccttcatactagttacaattctctttaatgctaaaggaatgtcgtcatctgattcatcatcatattcatctctgtcagctagaacctcatcaacatcacctaaagttcttgtcctatcaaccttattagatgcacttaattcaagaccaggccaaaaactaattgaataaatacgatctctgaaggactttggtaatgggtttttcttatcaatattaaatgttgcaatccttgccaaattgactgattctcttctattaataattgggggactaaattcattcatgctactattatcagtgtcatccatatatttcggattaaattgaaccggttgatcagcttctcccgccatttcttggttactgtcaatactaatttcctcatcattgtctgatatacctaattctatatgactactattattgggactaatactagaacgcccgtcgttatcattaggcttactatctctgtcacattcactgcttggaatagtagttaaattttctgactgtgaatcactagacaatgaagaagaaaaagaagaaggctggttattggaatcctcgcctttaataaaatcatcaaaccctctaatagcctctgcagcccaatcctcatataatggacgagataaaaacccatatttgaattcgtttatacctacaaccaacttggttaaataaaccagttcttcaatatattcaataatctcttctgtagctgcacatgatgcactccaacttaaatatttttcttttgttaaaaattcttgagtgtccaatttggacttttttgaatgtgtaattaacgttaaaccttcatttgatccactactgctatctgaagactcatccgtacgagataccaatggatctaatggctgtaaaccatctgatggacgcttcttaaaatctaaccttctccgttcctgattcttccattctaaaatctgacgtactttatttattaatcttctatgcgatattctagtacttggcataaattggggtaaaggtgttttattaaggaatgcttcttgaacagctctaactgatacagtcaaattaccaactagttgtcttctatatggatagacaacactgttcaattcttcaaggattgcggacccgtattgttttcttaataatgcagctgtatcaattctttccactatttgtctttgaataaagataatctgagtgaaaatatgttctaattcactaaaatcaccttttaagcgcggctcttgtctagttaatccattatatgacttagctctatctaaagctgctttggcagagcttgataatctaacaatttgttgatattttgaatcctctagggaattaacggtgatttcaccttctagacctggtgcaaagattaattccatattggatatacaaccacatacaaatgctacttctgatgtaagctggtctcttgcttttattggataaaatagcacttgaacaattaaggcaattacaccaccataacccaccgccaaacatctcttagcaaaataatctacaataccatgaggaggatctgaaggaataatagcagctaacataacaacatatatactaataatctggataatagcagctttgacgtaaggggtacctaaaaagtaataaaatccaggaacagcaccaaatatagtaataactgtctctaaatatggatttgtctgattaacaccagaccaatatgagaccatcccccaaaatgcacctagaacaacaccaacagcacgtaaaaagaaaacccagaaagtaccaccaacgcatggttccatacacaaaatacaaacaaaaccaacccatgcaccttcataatcaacataccactgtcttattttaggaacaaacatagggaaggatgaaatcatcaatgctaccgttacctgaaaaccaaaaataaagtgcgatttactacgtgtacaaaaattattaatccatattaacaaattcacgatttgactacgagaatcaatcctaaatttttctccagtcgaatcccttatcgtcataggtaaaagggtcttttctgtagatatactagctctatgtgcactagttctttgcattaataaatcatcttcttccacatttggtcttctagctacgagctctggttgtctattataatgaataatacctttcaacgtatcatcctcagtgattctaattgagttacccatataccattttttcactgatttgaaatttttcaaaaaagtgaaccaaacacgtttaccacgaatccatccctttttctcctgagtttgcctatctatcaatagttgctttgtaacctttgtcaatttgacggtctcaatagtagtttcttttaaattcatcaaaaatgagcaaaacaggaacatttcgtcatttggactcaacaaatcatgatcaattttgaatatttcctccttgaaaacctcattgaatctagttaattccaattctaattcttttatagttgaatcaatctcttctaatgacggtaattccactttattagcaattcttggattatattcatcttgtttaaagcatttgctccgaaagaccctatcaaattttacatcgtatgaatatgctaatgaaatattaacataatagagacatttattcagacgttcatgtaaattatagattggttttctcaaatgatctatgacatataacagcttatttgcatcagcatatttaatttctttttcattatgtagtttcatatagttttcaggtgattgggtattattattactattatcattgtttctacctagtaaaataaattgtaattgacatgcattaatgataccattaatataaatagccatttttttatacttttcgagtacatcatttatgctataaggtggaacgtatgaatacgaaatttcatacatgcattcttgtagaacaaggttacaattattaatctttttagatactaaagttttaaatttcaataattttgataatgtaacaatatctgtttcatataaaaaatcagaactccgcatatttttatcagttgtatctacatcactattcatattcatattcatattattattattattattattattattattattattattattattattattcttattcttatgatttttagtctcatcatcacctatacctaaacaaataaaaaacttaatagattcattaatatctttatgaatttcattcaaagcgtctatggcagcattacctagataggtactgccgaattccggaaataaaacaatattccaaaacaaagacattgcaatacccatataaaatggagtgctaaatgaatttgcaatcacaccatagtcatatgtaataggagccaaaaaagtgaaatggaccactaagaataaaggaaacacaatagcaaaatagtgatgtgacaccgaacgcatccaaccgtggaagaaaagcataaacatttcgaatattgctagtatggctagacccgattcatacctcctaaaattatttttgtactgttcttctccactaagggtcctccatgtaggtccaatgcattgcattgcgatgaatttaccgaataaagcataagccaggccaaatataagacctgttatacaatacacagcaccttgtatagtaccactgaccctcctaccaggatgaacaatgactgatattaatggtaacattacaggttcagtgcctagatgatttctaactttcggtatcaaacaaaatattaaagcaactgtggaattgatagtagacttaaatattctctgagcgagtattcgatctataggaacatatctcttccacaatcgaatcacataattgagcttttgattacgtctcaaagagcccatcattttaagttccattgctttctcacttagttatcttcaatatgaatgcatatatcaccctttttctattattttcttaaattttattctcttctattttctttttttggctcagcaaatatgcgttgacaataccagtgctaatctatttaaagggtctaaacaatttgctttatacgcactatttacttacataaatatctctatcagtatgtccctacaagtaactcctattaatctctccatatttatgaatctattctacttttaagtcttcccaactccgcgtttctccaagttggcaaaacccgaaataaaaaaaaaaaaataataaaaataaaaataaaaaacatttaggtttctcacaccggagctacaactccgtcactgtgtctctaatgcatataagggtgtatgggtggccgtccaagtgacacaaattctatgactatttgaactggtgacaaaagttaatacattattactgatttacacaatattgtaatgacaatgtcaatcatgataataatggtagttatgttatggttgactataattaacagcattatacttatacaataaaaacgagatagattcacaaagctaacttttaacaataacgacatatatattcatatgtagatatagatgtaaacagatatgtaattggcggaaccgttttttcaaaaaaaaatactattaagagaatatatagacttttcagtaatatgagttcttattattattatcataatacgactgattttgaccatatgcttggttttgatattgattttggttttgttcatcatatctgcttaggtgttgattattgtggttattataattattattattattattgtttgtgttgccacttagatatgatgcagccattgatgcaagtgtagaagtccatgttgaaccatgttgttgttgttgttgttggaaattagcatcattagcattattatgattattactattactatcccaattattgctattgttattgctattattattgttattgtcaccattaccactactcatatatgaactagcaatagaaaataaagtagaccctagagaaggtccattgtcattattattatgagattgatagtaatcttgctcatattgttgattatttggtctattattattataattgtgataactgctattattattattattattattattattattattattattattattattattattattattattaaaactatcataattattattgctattatagctgtgataactgttattattataactgctataactgctattattagaatttaagtatgaagatgccatggctgctaaattagcaaaagaactaccattgccactatgttgttgttgttgctgctgctgctgttgatttgtattagagaaaaattgggaagctaatgaggctaatgcagcactgcccatggatgacacagcattaccattctgctgctgctgttgttgactagaaaacatagacatcaccgagttaagattaaacccagaaccattagcattattatttccttgagacattaaagttgttaataaagccagtttacctaattgggactgagatgaaccgttattattgctcatgaaagtcttcattagaatcgatgccatatcaccagcattcccgacactgcgatcctttgaaccacttgaatttccaataatatattctgcaattctacgaatcaacatttcaatagctgatatttgattatcattcggatttgatctggctgcctttgttaaattaactatagcttcttcatgctcaccattttctaaattagattgagccttttcaataaaaccgtcgatttcagacattcccttttttctctttcttttttcctttgcttttgagtcttattagaaaatatatatatatttaggattgatattataaagctgatctttgccaagcctttacatatatgtatgtccttctaacttgattgagttacttccaaagattctgttgcctttgattccaaatggcaacaaacggaaaagtgaaaaatttcataatcccgaacttttttctttttcttttttttctttttaagtttttattatatacaatttcaattcaaaacagagtattattcataatgtacagaaaacagtatcactagaaagcatcctgcacccctcccctcctctaaagcaccctatcccttttatttagtgctttaacttttttatttctgttaataatcatccacatagctggttacctttgtcactattattatatatgcatttaatttaaaatacattaaatcacgataaaataaaagacaatgttttcagatagatcaaatagtgaagttcgtaaatataaacgaaaaatagggtgtataattcaaatacccaacattggacgtggccaactgaaatttgtaggcacagtggataacaaacctggctactatgcaggcgtcgatctattggcacctattggtaaaaataatggcacatttaatggtagaagatattttaatactgagtatcctaaaagtggtctttttattcaattacctaaaattgcatatctgatagatcaagctgaatctacagaaacatcaccttcttctacggcttcacaacaacgttctagttcagttagaaaattgaatatatctagaagatcaactttaggtgggtatggagagacattgcataacgatagcaataaccataattccactactattcacagcaatcatatgtatacaatatcaaataatataactaatgacactccgacgcctaatagaaatattcctatgcttcatcctgatcctctcttgaacagcaataataataataataataacaacaacaataataatcattgtaataagtatgaaactaataatagcgatatggatataagtagaagtacattagatgaaattgataatcacaacaatcataacaatcacgataatttatctattaaaaatccaaatgataactttcaattattaaaagaatatgaattaaaattagagaaacaaacacgcaaattgattgaatatgagagattattaaatgatcaaaggatggtgttggaagaaattcaacctacgatagatgaatatgataaaagggtcaatgatcttgaattggagaggaacaaattaaaagaaaaactaacagagtctgaaattgaatttgatagacaattgaaatatttcaagaccgaaaataaacaattaactgatgttgtaaatcaattacacgaagatttaagggtaaatgaagaatacatgcaacaacaacaacaaaaccaatcttcaaatggaatgaattctaatcttgacgttgatattgaaaaaatgaaaagacaaatagaaacattatctaaatacaaaaacgatatggaaaatgctaaagctaaatggaataaagaaaaagaccaattaaagatgcataatgaatccttaagtaaggaatatcaaatcctaaataaagaatatatgactttaatttcaaatagcaacagcgataacaacaacaatagcagtgaaaataataagtatgaagaggttatagaggacaatagaaaactaagagacaaaataaaacaattagaaaataaaataataaatctagaagcgaacactaaccaaaacgatacccaatctataccgccatatatcccaccagttaagatagatgcttcagcaggcagggaattatggtgctcgttatgtgaaaaatcaggccatgatcaaatagattgtccatatcaatatgagccagctaatcgtccacataatgattttacaactatatctgcatccactacgaatgacaataattttatggacaaaatcgatactaatagagtaataaaagacaatgacagagatataaccactacatctactacacaacaacaatactactagagtactttttttttttttttttataaaaaagaaaataatttgaggatgtctttatacttaaccttataagaaagttacatgatatagaatataatatatatatgcatgcagtaggatttattatgagaaaactttacataaaacatctatatataaatcgaaaaagggttattattttcacagataacaacccagtatcatgttgttaatgatcgatatgtgtatataagtgaaaaaaaaaagtacataatgtatatgtgagtatcaattaacatactttacaaaatataatgtaacataaatatgactaagatacatgataagcagatcctaaaataagatcttttttgtcatctttacatcggccaacaagagaacaagaaaaaaatttacaaaaacctaattacaaattacaaataccccccaaaaaactatagaaaaccatatctaattacatactagccctatattttttaccgtccctcaacagacaaaaagaaaaacttataaaacagagaaaaaaaagaaaattacgaggaatttctcaatggaggtatgggtgttacatttctgagtcattatttccaacaatttgtcttttttataaacacaatagatacgtcagtctttgtcggtattatctctttttggattaaacatagcgtttgccacgaaagtatggtcgagaaaaactctttctctctgcccctttctgtcatttttacctacttgaatgctgtagttcgagagatcaactgagataatttgtgaataagtaaagtaatcgtaatccgatgagtcacgcacatgatacactgatacgatataaatgaatgaatgaatagataaatatatatgttttgttgattattatgacacataattttattgttgcccgataacatgtggttcataattcccatttttgtatctctctttatctgttaaatcctgattattcttatatatatatttgtatataattgccttgttttgccaacatattaacctttaattgaatccttattgacttttattatctgtttaacagttcttgttatactctgtcaagctgaaaaatctgagaccatttctcatacaagcagccttattgttcattataatattgttattggtttagatattgcaatccaacatgttgtacccaattttgccattatttggcacagattacaaatctgttcttaataaaaacccattcttatacttaactcaaagagctgtaatcgatactacccaattaaactctgttaattccatcaagcagttcattaacgattccagagaaagatttaactcgattgatatcttaataaaaaatgctaatcaattcaatgaagatcaattaatcgaattgttaaataacggagtctccaaaattttcactttagtagaattaccaacatccaacactatcccgcagactagaatcatatctaatgtcccaaagtctctagctccagctaaaaatctcactttaaacaagtttgtatcctgtctcattgattcaattaaaactgatagaccagacggtttatatactactttagtagtggattctaatgaaagaatcctaggtttggtctattcttcgaaagagtctatccaattggctgttgaaaaacaggtaggtatctattattctcgttcaagaaatgggatctgggaaaaaggcgccacttcaggtaatactcaacgtctattagccattgatatcgattgtgatggtgatgccttgaagtttgttgtagaacaaaaaggagatggtttctgtcacttaaccaccgactcgtgttttggtgatttcaagtatggtctatatgaattacagtcacttttacaagatagaaaggctaatgctgttcctggctcttatacaaatagattgtttagcaatactaccttattaaatgctaagattgttgaggaagctgaagaattaactgacgcaaagagcaaagatgaaatcgcttgggaagctgctgatttattctattttgccttaaccaaattagtagctaataatgtctctttatctgatgtggaaagaaatttggcctctaagcatttaaaaattactagaagaactggtgatgctaaagaaagatatctgaccaaagagaaggaaaaagatgttaaaagaagaaagattgaacaacaacaaaaacaacaacagcaaaataatactgatgatctaattaatttacacgttgtcaaatctaatgatttggaaggtgtcactaaagctgtcactagaccaatccagaagacagctgatatcatgcatttggttaatccaatcatcgaaaatgttagaagtaaaggtgaccaagcattaattgagtatactgcaaaattcgatggggttgaattaaagaaacctgtccttgaagcaccatatccagaagaatattttgagggtttaactcaggaaatgaaagatgctttagatttatccattgaaaatgttcgtaaattccatgcagcccaattacaaaccgaaccactaattgtagagacacaacccggtgttgtctgttcaagattcccaagacccattgaaaaagttggtctatatattccaggtggtactgccatcttaccaagtaccgcattaatgttaggtgttccagcacaagtggctggttgtaaagaaatcgtatttgcatcaccaccaagaaaatccgatgggaaagtgtctcctgaagtggtctatgtggcatctagggtgggtgcgtctaagattgtgctagctggtggtgctcaagctgtagctgccatggcatatggtactgaatctgttccaaaagtagacaagatcctaggtccagggaatcagtttgtcacagctgccaagatgtatgtccaaaatgacacccaagcattatgttctattgatatgccagctggtccaagtgaagttctagtcattgcagatgaattcgcggatgaagatttcgtcgctgctgatcttttatctcaagctgaacatggtgttgattcacaagttatccttgttggtgtgaatatcagtgactcaaaagttgccaagattcaagaagcagttcacaaacaagctttacaattaccaagggtagaaattgtccgtaaatgcattgcacatagtactattatcctttgtgactcatataaagaagcatttgacatgtcaaataagtatgcaccagaacatttaatcttacaagtgaagaatgctgacaaatatgttgatttggtcgatcatgcaggctcaatcttcgttggtgcctacacaccggagtcctgtggtgattattccagtggtactaatcataccttaccaacgtacgggtatgctagacaatatagtggtgctaatacatcaacattccaaaaattcattacatcacaaaatgttacacctgaagggttagataatattggtagagctgttatgtgtgtagcaaagaaagaaggtttagatggtcatagaaatgcagtaaaaattagaatgagtaaattgggattactaccaaaagattttgtttaaacacaaacaaataagaagaagaagaaaaaaatcaaacgaaacgataatgaaaaacatatgcaatgacagtattacatgtaattataaatatttatataaaaatgtaacgaaatgatatgatatgtacgcaaaccgaattttaacacatgcctattttttttttcttttacatatgcctatcatcgctaagacaagtataacagtattatgttaacgatctgatggtagaatcaaacttccgtcctggtcaccaaaaaaccacaaatacccttttccctccctctcaagtaatactagtttaacaatgtattcttactactaataatgtatagtgtattaaaacaagcacagaacttcaaaaaagaaagaagaaaatattattaattctgaaaaaaaaaaataaagagagggagggggagagacacagagagaaaacaatattccgagagatttattagcactgaatacgtgaagcgataagacaacagtagaatactatacgctgctagcaataataatcttggctacaaatgaacaaaggtgtggtccacatacaatgaatcaagcagcacttgaaatcggctttaagcattcaatatcgaacaccacaagtagatttaccaatatgcgtcaaacgttattaccacccttaaaattatatagaaatattcttagagcacatcgtgaattacccgagttacaaagagcattaggtaatgaatatgttaaaaatgagttcagactacataaggacattgaaaatccattacatattgttggatttttagctagttggcaagactatttgagtctaatcaataatggagcttggcaaactgggtcactttctcgagagacttttgaaaagatgtctactgatcaggtagtacaattatatgagttgatgaaagaatcagaacgtattaaaaatggtattgtaggtggatctgaaacgaccaaagataccaacacaaagatagagaccagaacagaacgtaaaaattgaatagaatagagatattggaaagaagagagaaaaggccataaaaactaaaacaattactagcacaatttatcttctctcattaacctattgtatcataagcattatatatatatatatttcttttttcaatcgtttcatgtaaatattaatagacattcatattcatttgtctatttttagtcgaaccatttcagcaagaattcatcggtttgtttattcaaaattgttctaaattaatggcaacaacaacaactcctcacgagttataattacggataccaactatatagttgtcgattaacattatcgccaccatcatcatcctcttctttctgctttatttaatggccattattaaaacccactgcgcagcatcttttccgaaactgttaccgcaataattccgcaacggaataatttaaaacctcttatcttttttttttttcttcaagaaaattaaaaaaaaaaaaaacaaaaccgggaaaaaaataaatgaaaaatttttgtttgctctatcgtcatcttttattttgtcatatctatattgaagtttggcgataaaaggatgaactttctaagaatcacttttgattattgaagtttctctcattcttaacatatacttaagacctcaaagctaaaaagaagctgcagtgttctactaacacaagctgtgatcatatatacaaaaaagtgcgaataatccaaaatattcaataatacaaaaaaaaatggcacatattaattctatgaaaaatgggttcttagtaataccgttcaaactacctgatcatccagttctttcagaattaaataataacaataacaaaacgcctgcatgccattacatgtttatgaaaaaacatcaagcaaaacaagaagaagaatcgaacagtatatttctagttaatataccattattgacaaacctagagtccatgaaatctataatacaacagatatgttcaaaatatgatactgtatcccatgtagaagaactattatataacgatgaatttggtcttaatgacgtcaatctatcgagtcttacatctgatttaatgactataccaaacgatatttctgaaactagatttactccaaggaacactgcattacttaaattcgttgacaaatcaagtcttgacaattgttggaatgcccttttgaaatactcaaatttatcaaatacagaaaaatttatcatttgggattacaatacaccatccatctccacattcaccaatttctacaaacctatagatctagattatttgaaggaagacgtccattctcatttatccatctttgaacaacgtgaacaagctgctcaagatgaagtccaaggcactattgtggatgaagacggttttacattagttattggtaaaaatacaaaatctttaaattctataagaaagaaaattttacaaaaaaatccattaactaaacattcaacaaagaccaaacctgccactatggtagataagaaggcaaagaatgatttctataggtttcaagttagagaaagaaagaaacaagaaattaatcaattgttaagcaaattcaaagaagatcaagagagaattaaagttatgaaagctaaaaagaaatttaatccatatagagatactctatgatatatatatatatatatacatgtatactgtaatacatagatatattacatatatatatacatatagatttgttatttgcattttggtatttcttcaactccttataactattttcatattgtacgtattttttttcccctataaaccacatttttataatatgtgtaaaaactaattctatcaaatcttcaaattatatattgatacacttcttatatattatttttcttgttattgtaataaatttttattatagtctacctccaggtgtaatattattgttattattagtaaagagatcgttaggttgaagctcttcaaaatctccacgtcttctcaacataatagtcggatgaaacccttgttgctttaaagttttgaaaataacaacaggattctcatgtaattcaagtattctctctttatcaccatatccaatgacaagaacatattgtctccaatcttcatcattcagattatgttttctcattgcactttttaaaatcttttcacttgaatcatcctttgatgcacgcaactgttttaatgcttcatgctgaactggtgatgattggttaggtacagattctaatttcgttgacttatcataataatcatgattattatttaaattagtacgtgacgatgaatgaatcaaatgtttaataggtgtctttggtgtaacagaaattggttgactttctacagtcttagacggtattgatgtcttaatatttgatgtggaccaattgttttttgaatgtattatattttcgtcgatattttcattggtgttatgaatatgattaccactataattttttaaagaagacatatattttgttaagtctgagacctctactttcaattgattaaattgagattgaaagtcttgaaactttgattctgctgctaaataaatattatctaatgatgccactatcatttgttctctttgcaactgctgtttcagttgctgagatgactttccgtttgtattattactgctgttcccctttaatttatttaacattatctttaaccgtatagcctttatgagtccctcttggtatatgtctgagttttccttaatctcactgttagccacttgacataattctttacaatcatctagattcaaatctggtagcagatcaccagttattctattagaacgaatcttcacacacagttgatcattttcatcaagttgtaacgtatggacacaccattgtgctaccatttctgatgtccagtttaaataatcttttaaatcaagtattggcaaatccacttctgccttatttgttgaatttgatctttctcttctaacttcatccattttttctgtgtcctttttctgttcacctcaattgttttgaaggatttgtaattcaaaatatatcttgttgtcttgatttaattaagacttcaaaattgcctatttctaatttagatatcctatatatatatgtacgtatatacacattttttttatgtttattccctcttattcaactggtacccttgatcttgcatgatttaaaaacaaaaacttaaaaactttaaaaatatcgtggtaaatacataattttgatgcaactatatactccttttgggaaaccaactatttcctaaaagggtatcaaattaacacaggcttttacattggacatatttataaactcgtttcttaccataaatacattgtcaacagatacacaacttttgttatttacaaaagttgaaacaactagttaatcagcagatgtcattaacactaaccaccagagtattaaagtgcaactataagaatatagctaatttatgtcaagtatcttatacaatgtctactcaaaataactggaatcctaacttaacaccagaacaattatacgttttaagggataagggaacagaaaggccaaacacagggaaatatctgaagaataaagatattggaatatattactgtgcaaactgtcattctccattatattcaagtgaaactaaatttgaatctggatgtggatggccggccttctatgcagagattaatcctgatgctttacaatataataaagatgaaactttgggtacagtaaggactgagatatgttgtaataattgcggtggacatttaggccatgtttttgaaggtgaaggttggaaagcacaattaggtcttccaaaggatgtaaggcattgtgttaacagtctttctttagagttcaagaaaagggatgagtaattaggagtaaaatgcaacattctgtttgcttcttcattattttactttgagaagactgggtataactctaacacaatatgagattgtatattcgttaaaaagaactgttgtttaacgcctatattttctttttttcctgtagtaaccaattaataatattatcataatatatttttacatattaatttacttacttattatcaatgtccccgtcttagtatatatattttccaaatattatatatcaatacacaaaagggttttttttgttaaagttggttattgtcgctgaatgggttgttattattaaattctcttgaaaatgagttttgttttttcccctttgatgaatctttaacacttggatgcgtatcaacaacccaaccactattaatttcttcagttgcacttgtttcactttcgtcatcctcctcctcctcatcagattcatagtttgcaaggctatcatctgaatcataaacaagctcatcatcatcagtctctggttgacacctcttatcgtatgcagtcaaagctttaaccaattcgtcgttagcatgaagtaaactgcctaaaaattttccctcagtgaccagttgcaaatatcttaacacttttcttctaattgctcttgcctgaacaaactttgtggtacaatcttcgtcctccatggcattagcatctacaggtaaaaccattaaagaattttccaatgctatagctgcagccaatgcatcactgataataatttgaatctttggatcctcttttttcaaatcaatctttggtattctatatttggcatcatccttatttctattcatattatgagggttatcatattggaacacagtttcatctgcactatcatccataaaattattcttcaaacggattgctgtcaaatcgttggacgtagtagctacaatttctttcattttatgatttttgacatatttatataatttgacgatcgattcgtaacaacgtttattcttataatttcttgactctatgtactcgtaccaatttaagatacataatcttgcataattgatgacttctttagcgtagtgttggccattaccatttagtttttgattcaaagcaataacagtcaatctttcaatcaatttgaaatcattataaagaacactgaatttcaaaccttgaccgatgaacaagcctagcaactctaaggttcttaattgttgcaattcgttaccccatttcaatttctttctgaaactacgagcagcttcttcttggttcgaaatatactggtgttcagtacttatatcatcatgggtaccaaggtcaaggggacttctaattaaatcaactagtggacctagttctgcatctaaggaatatttacgagatgaaactattctatttatctcatcggtaatagctgtgtgtggatgatcacttaagaaccccattttttatgaaatttgctgttctttcaatatgtatatatgtatatctatatatagctagtaacgttgcttaatcttccttaaataaccaagtgatatatatctatatctatatctatatatacatagatgcaagcacgaataaatatatatggatacaaagggacattcctagcttaatttcgcaattgtcgtgttagaaaggctaccaaacagacacatattcactcatgtatacacacgtgtctatatatgaagatatttcagacattttatcagagagaagtattattcctcgaggctctctccttttcttatcaaagcgttccccctccccctcaccaaaaactcatagaatttttcaagatcaaaagatttggaagaaagaaagaaaaacaagaaaaaaaagaaacgataaccgttctagatttcataaaacccatacacctccccacagtttcttcacttaatcctttttttttttaattttaaagaatacaaaatctatttagtaagacggtgttataaaaaataaaaaaaaagaagcaatgctttatgacatagggtttcgagattaaaaaaattacggaaagtggatttacttttttttaatgtagggttgagtaatcttatgccaaactatttccatttacagtttagggtacaatcctgtttttgcatcttaaggcattgttctttcgtccgtctaaagaaaacacagtgttgtattattttcttgctatataatcattattattattattgtacttaatccttgagttttgcccctttctgctagtggggagaaattttggcatttataaagaaggaaagaaggacatttaagatattccattagtaacatgatcaaaattctcttgcttgttctttcgtggaaacacttttcctttgctctctttggacagattcaaagggaagattatatttaatatatccttgttttctacttcctagtcgcctcttatctcaatttaattcaagttgttcaaatcaattctcacttcaaagggacttttaacttctaaccggcatttattcaaattttcaaccaagccttctacttcttcctcttttacacttacaaacaatatcttaagaaacaattattcaaaaatggtctctcaagctactatcgaacatattaagcaattaattaatgaaaaggacatcttcattgcatcaaagacttattgtccttattgtcgtgccaccttgaagacacttttccaagatttaaaagttcctgagtctaaagcccttgttcttcaattggatgaaatggacaatggtgcagagattcaagaagccttaaaagaaatcactggccaaactactgtgccaaacacctttattaaaggccaacatattggtggtaacgatagtttacaatctttaagaaattctggcaaattagatgatttattaaaaccaattctagcttgaagtagttaatataaaatatttctttaaatatatatgaatatataaatatatatttatcttaatcatttttattctattcttttttcatgttcattcggcattgtatccagatttatatcttctactatattaaagccctcacctgcattggaaacccatctacatccatggaattgtgttatgcctaataagttttctctttttttccttaaatctgtatccttcctattgctatgaccatttttattcttattattgtttgaattgctattactattgctgttcattttgataaactcaataactgaggcaatgtttgtcataggtatattatatttatatttactagcaggcgatatcatatcactatcaacttcactattatcatttttatgcatggcaatatcatctctttcttgtaacatatggattttttgatacatatactttaagtcatccaaatgatgtagttctctaaatttatagttcccaattgttaacaacaactgtaaagtataatatgcatcattaccagcattatgcatatatgaatgtggaatgttatacaattttagcagtttgccaagactaccatacatatctccgtacaggatctgatgaaacctacttgtatcaatgatatatgcagtctccaatgtttcagatggttgatatctgaaggatatatctttcatttttgagggtaattcaacattcattgatgttaaccatgtcaaatcattggatatcccatgccccacaaagcaacggccccaggttttatcctcctctgtcttaggtaccatgtaaaaattgatcaatgactgaataaaagtagtgcattgttcatacgtcaatattaatgattcgcctaacaaataacaatctttaagatccgataaaaaattcttatttcgaagcgttagatattctgacacaatcaaatgataattatgtaaaatcggcgtcatcaaaccaaattcaggtaaattttcccttgggtcaaatatagaaatacctatctctgtgataatattttgatttgattcaaaaccctcaatatctagtgcaaataagattgaatttttacgtgatatggttaatattgtcttttcgatgtatttccaaaaatctaatttagcttcgatacgtggagggatttttttcaatttaatattatcattctttggggttatcagcttaaataacgttagattcgaatgcagtggattcatatcatcctttgtatggtctattggcagatttggagtcattctacgttgttgaatatatttcaaggtatctgcttgatcttgatggttcatatcgatcatgaatttactatgttcattggctactttggataaatatttgtgaacattcgaatttaattcagggttattatatagtggaatggaatgtaaattattaaaatatggaatattatcatgaaaaatcgatggcgtgccttctacagtagtcaaaaaatttactggagggtttaacttcaataattttttagctggttgctgctgttcattttccatttcagaggaaatttttgatatctttgaatgatcagaactcaaatccttctgatgtatatttatatccatttttgataatttcagttggatgctttcatgacgtgacctttctatacgagattgtttatcttgagccacctcttttacgttatctctgactattttctctttacggaacatataatcccattcttcctttggtatatcatctatgttattaattgcattgataccaagattttggattatatcatttaaatatttgatcactacattgtgctgatatgctctattggatcttctttttgtagacttaactttgtctttcccttctgtcatcttgaattgcttatacttctatgcctttttttattttatttagtcttcttcttcttattattgttataactgttacttgcttctattatacatgtccttttaatttgtttctttgttagaactatacgcatttgtctcttgatgaaagatctaaatttgtattcatggttttacatgtacccaaaagaaacaggcaatactcaaacaagataaacaataaaacttaaatgacttataagactgattcacaagttaagtagaaaaatgattatgttatatacatgggagttgcatgtacaaaagtatataaaaagcaaaaatgaacaaaagaaaggttgtcttcatgatatataaaaaatgtatggtagcactctttctacaagtgaaatttttgccggcaatacttagcagtaactaccactaaaatacatcgaaagtactaaattgatcgcaaaactgatcgtattattagattttatctcataacgatggagattgaccaacacaccaaaattcagaattctccctggtgtatttttcacgtactaagtaatgctactaatgtcttctttaaccaaacggccagccatattttatgatagaatgtttcacagttctgcactcaaataaaaaattaggtcttctccttcgctacgcttctcactaaaaaacaaaaatgaaaaaaaaattttttcagtcatttccaacgacaccctcgagcccacgcacaaaaaaaaaataaattttcagctcatcgatttttttttttttttcatgttatgtaatttctttaatattggttcagcgacgtcgacgacaacagtgaatagtgaacttatgaaagtttattagttacttaattgatactcttttgtttcgtaaccattattacctctctctttcagcaactagatctttttctcaagtaatgtcttttaatcattgagtaacttgtcttacttctttgtctcgtttctggttcgatcataagttgtatatcagattgtactcacgttactttgtcccgacgacaataacagcaacaacagccacaggttacgtttattgtgtcattctcaattaactttcaatttttgtttctattttttttttttattttttggtttcattgctagaaagaaacactaaaacctctacataattgacatacctgtatacttgtagaggatcataatagagtacaagaagggagatagatcggcaataataataaaacatccaaccaaatatgtccaacgttactgagactgcagttaaagaaactgtgcaacctgcagaaaatgtccaagaaaagactcaaactgagtctaatgttaactcatttgaaaataaaaaggaatcttctatcccaccagcagctaatctaattcctgctcctatcccaacttcttctccttggaaatctgttaacaaagatattccagttacatccatctctgttgaagattttgagtccttaaagaaaaagagtccaactccatctatcaaatccaacacctccaccaaatgggttccaatcaaagcatctattactgtttctaataacagcagtaaaaatggtagtaaaaataagaatcatcgtcatactcataacggtaaaagaaactcaaataatagtaaaaacaaacaaaatcattctaagaagaataagaagaattctaatcaaaataagcaacaagaaaagactgagaatggagaagcctctcaacctactgtttcttccgatgaagacacctctgtctctactactactactatagctacagaaactaccacagcttccacagtaaatgagaagcaaacatctactgaaattaatgattctaatgctccagtaaaaacttctgaagaacagccgcaagaaccacaacaacagcattcccataacaataatagcagacaaaaaagatttaacaacaaacatcattcacatcattttaacactaacaataacagaaaattccaaaacaaacaacaacaagggcaagggcaagcacaaaatggctttacttccaaacaaaataataataacaccaatttccgtcataacaataacaatcaaaagcatcactcttttagacctcaacagatggctcaattatattctatgttatatccattccattattcaatgatggctgtgaatagtgtggctagacaaatcgaatattatttatcagatggaaatcttgtaacagatgattacctaaaacaacaattatctaaagatgggtacgttcctttatcgcttttgtctaaattttacagactactaaacatgtcctttggtggtgatttgaatattattatggctgctttgagagaaattgttttcaatgaaaatgctactgttgaagtggctcaaggtgagcaaattattgaccctgttgaagaaagcactcaagaagaagaagaaaaggagcaagtacaagaaaaagaacaagaacaggaagggcaagagaatgaaaagaaaagtgttactgaaccatctcctttgactaaatatttcatccgttccaagaattgggaaaaatggttaccagagaaaccagcttttgaagttgaaattcataagacattatctggtaatgatttagatgaatttatgttaaagatggtcactgtaccacatcaccacaattaccgtaaccacaatcatcactcccaccgtaataaccgcaaccatcaacaacaaaagggtgaagaaaaggatggtgaaaattctactgctgaatctaatgaatcaaccaacgaagggactgtagcagatgaatctgctgagggcttagttgaacaggatgacacttcaacttccactactgatgttgaaaaatccattccagttgaagacacttccaaagaaggttctgttccagttgaagttaaccaatcttcatagttcatataatcaatatattttgttattaagttttttttttaaagaaaaaaaagaaagaaagagtataattctacctctttgcttttctatttaatcttctattaattaccacatttatttggagatataatcagatgtttcatatacaaaacaatttccatctgctaaattttttacaaataatttgagaataactgaatacgtttattaaaattgtaacaacttaattattttatcccattgtttttttgagaattaactagacaagaaaacatgccacggatatgtttttttttataaaaaaaatctgtattagatcgagataattcataatataagacgcaactatttttcacatttgacatgtatcatacttttcgttatatatatttatacctttacctacttatctttataagtataacaaataaaagctacgtagtttgtgtagctgttttttttttaaagattctaattagatattgaaaagtttcaaaaatgttgtgactttgttttcacccaggtgtatgtatatgtgttgctctcttagtgctatattattctatcaataggaatttgtaaaatacggcaaaacccagtggttttatttactgttacccacctttctttgtgaatggagcattcctcaattagcaacctctgttagttttggaaatgggggaaaaatataatgtccaggaagaaaaagatagaaaaaaaacgttcgaaacagagagaaatatgttacttttaaagggtttgatatttgaacacttacagagcagtagcagcaacagcaggaagatatcttcatgtcatctgaaacacagttgaactttggtacaagaaataggcaaaatatagttgttttgaaggtacattctcggtttagtgtaagtttccatcaggaaaagaatcatataaaatacagggattatcatcagtttccccttaacagatatagaaatcttccattatagattctcctgttaactaccatctgtcactcaatcttttttttcttctttttcttcttttttggatattactgttatcacataattagtaatgaattatgggtctcttccccaacgagagcctgttgaccagttattctctaatacaatttctgatcaacaaagttcagacaataatcagataatacaaaacaatatcaaaggttggtatttttattgcttctctagtgagccctttattgtttctgtcgtatcaacatacatcccattattattagagcagtttgccaggataaatggtgtgacagtggtggaccattcgaaaccttgtatgaattcatcagagcactgtgttgtacctctatttaatcacagaatatttgtggatacatcgagctttccattatacacattttcattgtctgttttaatacagactgttgtagtcataacagtgtctgggattgtcgatcagtggaattctattaaattaaaaggtaacattttagtgattttttccattgtgggttccttttcaacttacacaatatctagattgaataacacacgaatatattcattaccggctttatatatcgtagcaaattcttgttttggcgtcattaatgtagtagggaattctatgttacccgtattcgttaccaaatcaatacagaatgataaaagtgtagctcacgcacccaataaatcagtattacaagataaactaacaaatgtaataagtggccgaggtgctagtttaggttacttaagtgcacttttggtccaaattatttcaatgtttcttataaatggcagtaggtcaaaacaggacattcaattggcaattgcatttgttggaatatggtggattatgtggcaatcacctatgttttggttatttcaggatatgcctcttacttatttcagaaatataggtacagaaaatatagtaacgtcttccgttgatacgtcactattaaggacttcgcaattagatacaaatagagaatatgttttaaacaaacacacaaattggggaatttttagttatggctggatatcactatgggaatcttttaaacacgcaagactcttgaaagatgttatgatctttttaataagttggttcataataagtgattcaacaacaacaataaattccacagctgtgctattctctaaaaccgagttgaatatgactacattaaatttgataacaattagtattttaacaatgattaatgccatgattggagcatatataattccacaatttctttccaagaggttcagtctgcctcctaagagaattttaatattcattatttgttggacttgtgttattcccttctatggaatcttgggttttttgttccaaaatataggtttaaaacataaattagaaatgtatatgttagccatttggtatgggttatctctcggaggtcttgctgccgtgtctagatctgtgttcagtttaattattcctagagggaaagaatctactttttttagtttatttagtataacagacaagggatcatcaattctaggtccctttttgattggtttgataaccgatagaactcataatattagatatgcgttttatcttttatttacattgttgatgttttctttaccttttttagagatgctaaatatagatagagggaagatagaggctgaacaattaagtttacttaatccaccaatttctactactgatggacaaatctcaaatattccttgaatttctattttcattctttttatatctttttattatttattattcaatgaatatataattaataacgttatgtatgtttatttatcccataaagtaattaatagtacgtaattttccaaacttttattaacccatcatcaccaccagaaacaaagagatctttatcttgtggactccatgctacaacattacaatttttggtaaatttctttcttgtgttagaagtaccatttgtagttatattatttagaatcatattattgtcagcatgaccctgtaatacattaagaatattaccatttgatctatcccaaatataaatctttccatcttctgaaccgctaattacaactttattttggtaaccaaaacatgacctaataataaattgttcttgcctttggccaaaaaatttttgaatcaatatattttctttataatcccagagttgaatttcattaaattgcaaattaattaacactaaatgattcaacttgaaactcatgttatgttgaaaattgtcaatatcattgtttcgttcaaagatgtttaggtcagttggtgcaggtagtgaaatacatgtcatgtttttaccaatatttaattgtgttactcttggtgggagaaatttttccaatatggagttgttatttctttttaataagttgttattcggaaagcttgatatgtcgtagacgtcaataattccattgtgtgtcattaatattaagtacttatcatcgtttgatatcttcaaatcatgtacccttgggaacagattggcgttttcaatgatgttagaggaatcatctatattgaaattatggtcattttcttcatctctttcactgtcattaggtctatcatcattatcatcatgagtattactactgttagcacgacgagatggtccatgataataatcttttttatgattttggttatccgatcgataatacgaagaaatctgtgacattcgaagtatagttttctttgtattgaaattgtagaagatgacatctctatctggagaaccaaacacaataatattctcatgtttttttgtatggaaccagtcacagcaccaaactcttggggagatcttggaaggatgtgaatcagttgttgttggatcaggggatacagaagataatgaaggcgatgaattcaatgctggagaaggagacgaagatggcgaagatggcgaagaagtggatgtagtctcatgattatgagttgaaggtttatgtgtatattcaatcttcaaagaatctattggatatataatctctggcaatactctttcttttagtggtatatgactattattgtagacacttatagtggttgatgtattgatgacatcagagactgcctcaccctttgaatgaatgtcatatatgtttgcattctcgttaaaggggcaagctgccagatattggctgttgggagaaaatgacagataaagtatgtattggttattaccagctaggattttataaatttggaaatcattctcaacatcataaatacttattttcctatccgatgaagaatcagctattgaagaagctaaatatttaccatctggagaaaatagtaaataccaaatttcgttaccattaggatccctattattattattgttgttgttgttgttattgactgaaagtgttttaatgttttcaaatttatattttccatggaagtttttattatcttccaataaggaatatttagaataatctaaactggtattattattattgttattattactattaccgttataattgctggtgttgtcatcaaaaatgttgacaccactagtcaatttttgatatttaatagattgtttcaatagagtaatcagtcttccagtaggaatcaattcatccggatcaataatatttgatattatttttataagttcatcttggtaggaattttgtgttgaatataactgattgatcaatttgggattagttatgaattcggtcaagctagttaagaacaggtccgggtgtttcatcaacaattggtcagttgcaatagtgttgttaaaagaaattgagatagacgagaatactctttggtatagagagtgatacttttggataatgtttcttaagaaattaatagattgattaaaattatgactaatggaaataagttcgataaaatattgtctttggacaagcagcatgatctgcagagacatgacaaatgagggtaattggtctgagggaatcgtgttaagttgttttgatacagatttaaataactcatactgtctatgaaaatggtcaataatcataatatgatggttattgtcattgttgttattattattatctatgctaaaattaatatgatttttggcatccgtagtttcatctttgtttgcaaaatatccgatttgagataaagtctggtataaagtgactccacttggattaatattagagatcaaaggtaattgagataataatttgaaagtgatatcaaaataatatgattttctaatgttttggaaaagattctgcactaaattagattctatttgtatacctccactttcacgctgtaaagtcatacttgtttcatcataacccaattcttttaaactgtggatcaataatttcgtcaattgaatcttgttaaacgacatctttcaattttttttttcctcttcaatatatacaggacactttccttgatgtccaagaattatagttgtagttatgcatttgagtcacactcagttcaatataagtattaactaatacaagtttcacaactacactgactccgtaaaaaaataaaaaactgtgtcaatagatatattttactattgaacctatatagtcttcaatcttttctcttaccttcctttgcagcacccctttaccttttttttcttttttttcttcctcctctctgcgatttttgttcagtgcagcttgtatctaccttttggttagggttgaagaagaatcattagggtttggctttcctcagtcttttgaagacggctggacctgtcacgtgcacacgggactacttacatctggcgaaactcagacggtataagaatgtaaacttgttaacagaacagttagaaggtacgacttgcgatgtcgttacattaaactacgtgcagttgtgtatctacgacaagatgcttattgttattttgtgtgaaaaataaaaataaaaactaacattaaagaattaaagtcattttattgtcattgcttatatagatcgtattatatcgtatcatatatatgtgtatttattagaaggataagaaaataaaagaaacgaaaagaaaaaaaaaaatcaaaagaatttaaagaaaaaaaggaaagggaaagaaaataaaataaaataaaatgaagacggagaaacatgtgtgaatgttgtgttatgctactaatgcacataaagctgcaccgacgccagaaccgtctttagcaagtttgatgtggatctttctttctccctctgcacctaatggtgataatgccaatgcatgtctcaacattgatctaaaacctggatagtattcgacgacggaaccgtcacaaccaatctctacttcaccatggtacctcttgtttaggacgcctgtcttgatagtgattgctgccaatgggacggcggacaagtatgcagatcttcttgagatggcacgtaccaatttctggatctgcaatctctcggatggagaggttggtaaccttagcgattgcaacaaggaaagttctgtttctctcaacccggtggaatcatcgatttcgatgtgtgaaagcacttcggaatccagttcgaaggggggtttgtaaacgatgtggcagttgttcttttgttctgtattggttaaagatcaggcctcttgaatgtaaatcgactaggatgtttcttagcaattcaccaaggaacataccggagactctcttttcgaacagatggaaccccgggttagccgagaatttctggtctatgtccacgtcatatttggtgaccggtaggtgtttcagttcattatcgaaggacccccattctgtgttaatgaccatgtgggtcttgccctccttcaacaatctctcacgtaggcttgcaggcaactttgtgatcttgttgacctcttccatgtaacaaccgttggtacctgtaccaaagatacagccgatgatgggttcggagatctcccctgtggtcatagagtctgtgttattcgaggtgtaacagtgagaaaggaaggtgcctactgtgtcattggtcatggccacgacgttgacgaattcaaggcccagctggttcaactggtcttggtatagacggacgacatccttgccgacggtgtctgggatgttgaaccctttggtccatctgatcaaggtaccgctgtttaaagaggtttggtccactgggtaagaaaaggtgaaacccagacgtagagattcagaggttgaaggagaagtggaggaagaagaaagatagtcaggatggtatttcttcaagaagatcaaagttcttctagcaagatacccgaacagttgatcggaagtgacgtctttggactctaacagttcatctgggatcttggatttcatttgttccatggagtaggtgtgatcaccattaagagtgacggaacagactctaaagttagtgccaccaagatctgcggctagtaagataccttgttcggtaccgttgggggtactagtgacgaaggaagggatcatggggagccctttatctgttgttttattttccacgggagccagacccttttccatttgttcaatgaaatactcggtcagttcttctaacttctctggagtaatttcgaattctttaacgatggaatccacagcatcgttcaattgttgtgttttagctttgtgtagatcgtcaaatgacattgtgtattttttttttctttttttccaggatggagaggggaggggagggagtagagttacaacggggttattctaaatatctagttgatgttgatgttgttaacctttaaatagttttataatagagagttctaatgaatgaataagaaaaaaaaaaaaaaaaaaaagatcattaaaggcacgaaattcatagccatataaatatagacctatatatatatagatagatagatagatagatagatagatggatagatagataatagatatctatttacgtatgtatgtacggtatgtatatacgcacggtacggtatgtttgtctctgtctgtctgtgtacctgtgtgttggtgtgcctgtctctcacattgaatgaaaaagacaagaaaagaaaacaaccaaagaaaggaaatatacacgaaataaggggtgggtggagagaaggggaaaggagaaggggggggcaggcacccacacccacacccacacaccacaatgctgtctgtgcggggtaaaatagcataagaaaataacaaaagaagaaacacagcaaggaaatcggacaatttgcagttttctttgttgtttgttttctgtttcgctttgttttctttttttttttttgcggctgccgtccccttctttgtctggtgtgtggatgttgaattccacgtgacctcttagcctggcttagcttggccttattatattatatcacaccatattatattacattatattgaacaagacataaaaacaagagaagattctacttacatgtttttgtgttgttctacagtagaattcctattgcttcttactgtagtatctccagaagggcttgtaatacgactccaaatgggattttctttttttttcctgtggcgtggaagacgcatgaatgttaagggggataggcatgatcggcctagcaacaccaaatgattatatatatatgtatatatatatatatatatgtatatatggtttaactgtacaaagtaccgccaatttgcaagaacagtcacgtgacgcgacacgttaccgggtattattttgcacgtatggatcgacacaactcttacgtaatatatttctttctttttcttcctcctcctccccccccttttttgttgtgtgtgtgtgtggtgtgtgggtttggccaccgtggccttctttttttttttttttttcttgttttttttttccttgttctttaaatttcttttccttttcgtttgtttctatgtgtgtgaaatatgtccagacagacaaattctttgtgtttatctctccatcttatcccaaacgcctttcgacctatcaattttacaatatatatatatatatatacactcacacatgcgttcatatatgtatatatacatacatatgatatttagctatttatacattgcttgtgagggttctagttgacattagtagtctttccctcctgtttgcttgtttctttcctatttttatcaaggaaatataataaggtaaaaaattaaaataacataatattattaaaatttaaaaaaaaaaaaagaaatgttattttctaaatctgtattatttacactggccaccttgttggtcgatagtgttctttctcaacctggtgatatatctgctgttgctccagatgactcaaaagttgtgaaaatctctgatgctgatgaattcgaccagtttgttaaggacaatgacctattcttagcagagttcttcgctccatggtgtggtcactgtaaaagactaggtccagaatacgtcaaggccgcagaaactttatctgatctaaatatcccattggttcaattggattgtgaggcaaaccaagaattctgccgtgatttaaacatccctggctacccaactctaaagatctataaaaacgggttttcaaaggactatctcggcgctcgtacaaacgactccatcgtcaacacaatgattaaacactccttgccagtcgtcaacctattcaactccacagaaagtgtcaaggagttcatcagagactcaacactacctgtcatcgtcaattctgacttacaattgaaccaaactttccacgacgtcgctgaccagttgttcgacgattttgttttcatctctttaccattgaagaacgtctcctccgaaaagacttcaggtcgtttggaattgtacttggctgatgccaaagaaaacttcaaacctttcgtctttgaggctaagcaggacgcagaagaccttcaatccgagttggtctcctggattaagacccaatctatcccattcttcggtgatatcaacggtgaaactttccaacaatatatggaatctcaattgccactggcttacttcttctacacatcacaagaggaaagagagaaatatgtcaaggacttcgtttccttggccaccaaatatagaggccaaatcaatttcgtcggtttggattcaactaagttcggaagacacgccgaaaatgtcaacattaaacaacaattccctgccttcgttatccacaatttgacctccaactttaaatatgctttgcctcaattggctgaggaggaattcttggctctaaagaaaccttacaccattaaatctaaagatatcattaaacatgtagaacaattcctaaagggttctttggaaccaactatcaagtctgaacctgaaccaactgaacaagaagctaatgtcttcaaattggttgctaccacccacgaaaagatcgttaatgatccaaagaaggatgttcttgtcaaatactacgctccatggtgtggtcactgtaagagattggccccagtctacgaagaattagctgatgtctacgcctttgataagtcggctaacaagaaggtccttattgcagaagtcgacgcaactgccaacgatattgcctctgtagatatcgaaggtttcccaaccatcatcctatatccagctggtaagaattccgaacctgtcacttacagtggctctagaactttagaatccttcttggaatttattcacgaaaacggtggtaacgatgttgatggtaagggtatttatgaaaagtatcaagaagctaaagaattagaacaagaacaagaagatgatgaagatgaaactgaaaaaaccgacgttcacgatgaattgtgaggatctcccttagtcatttcctaacttctaactctccttgtttttttcatatacataaaatcacacactgatttgaatagatatatattgatatatagatatagatttttttttttggttctagctaaaacatataaacatatatgtaagtcaaatctctacaaacatatttcgctactatatcattgcaccctgatgcaagaatctatcaggtttttaagcaaatgtacatatgggtatccatgtgtgtgtgattttgcttgtcttctatgtacaattaaatgaagcacgatcagctgaaaatgaaaaaaataaataaatagacaaaaaagctaaatttcattctaatattaatatgaaagtgccgtttatttttaagcatatatgataaacagcatatttgaggtggtaacctttgctacttgaggagtactcttaacatatatagagccttcaactataagattctatacacgatcttactgttttgaagagtttttgatttttagtttgtttttttttttttaattctgtgtagtacaagagggagggaaacaatctaagatgtcaaataattccaaagataattcaaataacaatttattgtttgatgatggcaatgggaataatgatgacaaaaatagtgattcaaaagtgttcattaatagaccgagtttaggtttaaaattatgggggcctttagttcctgccgcagataacagaaagggactttgggcactgttatctattcagacagctattggtgtctatgccttctataggttccataaattatctactactagccgtatgccggtcaaattcagtaatagcagtacttattataatttgccaccaagtttgaatagattcgctaatccacagacaacagtgatgaccactcgtttccagtctggtagatatttgacttggaggaaaattggtgctttattgacaggtgttgtcttattatcacaatcatgtttagagttttgtaggttaatgttactaccatttgatccctggtacgatgaagcaaaattaatgagagataaaaaattcttcaatgatattattaaattctattattacaaagacgataaaagcattgattcaataaaaatagtcaagattgtaaattctagcttagatatcaaaactgaccagattaataagaatggaaatagaaatacagaagatatgtcgtgggatgatgataatgatagaaattctctagggtcagctgaaagggaaaatatacaaacaaaaacattaaatgccactgaactgagacaaagtatggctatccttaaagctcaaaaggaacaagctaatccagttattaaatggtttggtcctattgactataaaccaatgtcatttggaaaatatttagatctattagaatattatttatctatgagggaaaatctggaaattaatagacataataacatagataacaagaatagtagtattttaagtaatgctattttaatacggcctggttgggaagaagaatacacggaattatgcaaaaaaaatcaaaactggagagaacatcttcttaagcattcatatagtttatcaaaggtaaatgctgttgagtattctaattcaaatgacgaaaattcagagtcatcaagcattcctacaaaagctctagctagaaatataattattgatccagccatgaaatctaaggaaaatctggatttagatgagatctggactttgcacgatccatggataaatctggctttagacacatctttgagtattaaatttattcctacatcaataaaaaagaaaaatgacgagtaaatacaatgttaataagtacatgtgtgtgttcatgcttttttattattaataatgttattaagtgatctttttattatcatatattcaatatatatgaaagtttataaaactaccgtctccttatttataaataatatcaaatattctccttgcttttttcctgttattcatcgttttctagatggtggctcaatcttttttaatgttatctttcattcacttcattttcatttggctctagatgattctattttcaattacgtttttgaatattgctcgaactttaagaaactaaaaaattgagaaatataaggttagttgaaaaattgtatacgttcactcgtacatagaaaagtatagaggtaaacatacgtaggaatactcaattagagtacacctccataaactatcgaaaatttatataataaattagtgtagttttaatattggacattttatggaatagactatctagccgggttgctcataatctctgatataaaataataataaagacatacatatacacatacaaagaatataattagtcctcagattcctttaataatgtggtgggctaattggctttgtctggttttctcacttctaagattaacttttgctgtttttattgatgaggttggtgtaacagattgggctttgcaatcaataggtgaatatagatgcattgttggtgattatattgaagaagacctatttttgatcgtttctaatattgataatataagtttactatctttggttaatcgtaccaacggtaatttaataactagaagggtgactgcttcaagaattgtagatgttaagtatgatgaattacaggcaaatcttcttttatatgatgaagatcatgctacatctcagctttctatactaaataaagatatttatttaaaagaaatatccagcatggatgtaaattacactataccttccctttgtaataaggttaattataaaaatatagtgatcaccttggaggagaatatgttaaaggtgattgatccagaatctaaattgacagtcatatctattccattgccaagcaactttaaaggtattgagtatttaaagaccgactatttagaagaattagagattttattatctactaatgatttaacctatttttatcataatttaactaatgatatctctacaaattcatggtatagggatgaatcagtaacagatattgtggacttcgagtttgtcgatattattgatcattctatggactccattagcatggaattgaatgatgaaaacacttttaataatatttggcaggcttataattttagggtgaaaacaaatttcaatagattaaagaaatatgctaaagctcatcattattctccaggcagaatgataactgatttttttaatattgatctaaagaaaaatgttactagtgaaaaaagcttaattctcagaaattcaaacgatttaatatttgggtttaagaaattgttagttgttctaactcagaatagacaacttattgcattggacattaacagaggaggtgaaaaaatttggtcaattcaatctaaattatctaatgttgtttcaagttttgattgggatgcaactttgaatcaactaataatatttaatgaccaaggtgattatgaaatatggaatttgttaaagccagtgcttgaaccaacttttaagcaaaatggaactttcaaggattcattacctaatgctaattgtaatatattggacattaatagattaagtcataatgataaaacctaccatgttcaattggattgtaaagacatggattctaatcgaattgatatgatcgtttcattaagaaatatacataacaatattcatagtacgagattttttgttactcatgataatactacaattaaaggacatgttgtccttaataacacaaataaagttattccaacatggcaaataactctagataatccaaatgaaaaaattgtagcattttcctatagacatgatgttgagacagttaatcctggtttggtcttaggtaatagaactgtactttacaaatatttatatccaaatattgccagttatattgtatttaacaaaattactaataagatttatattaacattattgatactttgaaaggtgaaatattggtatcacagatgcatgacagggagtatgttgatatagattatccaattaatatacttattggtgagcattgggttatctattcatattttagcttagaacctatccctgaacaaaaaattaacgttattgaattatacgaatctttaataccaaatgaaagaatatctgatcctgataatgaaaacttcaatccattaaaacaatcaatcaaaccaaagcatatgtcacgctcatattattatcctgaaattattaacaagatgagcatctcggagactaaatttgatataacaacgaaatctattatactggaattagcaaatgggcaaattacctttttgccaaaatatatcattgatgcaagaaaaaaaacagaatctgagatgactgatgatgataaaaaggaatttatggccagttcatacattccaactatcccaatcaatgatctgtttgttattactcataaaagagatttggtgtttggcaaattatctaaacttggttcaattgcaacaaatttagaatctacttctattgtctgtgatgttgggcatgatatattttgttctaggattacaccatcagggtcattcgatgttcttgacccaaactttgagacaggtaaattagtagtttccatattagtatgtctcttattatatttgtttttgcgtccatatgtcacgaaaagaaggattaaaggtttatggctcgtacatgaataaacaagattgattgtatatttatagttgttttacattttacataaatagattttatattacttattgtttattacgtaatcagtagtgattaaaagaatgattttactactgactatttatgcacacctacttgttggattatctaaaacagtattggaaaatcaagtacttttgttttgtggtagttcttatttatcatgtgaaaggtgcatatcttctttctttgtattttttttcttgtatgctgccagaaaagattctagcttttataaactcttgcctccaaaaaaaaagccctttcaagtgttggatggactcaatccaataaaacgtacataagtttcagaacggatctgcatggactttaaaaagataatatggagttaacctctggttttacatcatgtttacaaaaatatttagattttgagattaataagaatacccaagaatttactattgtggaaggaaatgacagaatactaccagatgaagagtctggtgaaaagaaccctattcttttggtgcttgattcctcttttaatccaccgcattggggtcattatacactgatcaagaaatcatatgaatattattctcagtcgtaccctaacaagaaaattcatgtgttattgctattatcggttcagaatgctgataaagaggcaaaaccggcaagttttgataaaagaatggacatgatgtgtattatgtcgaggttattaaataaaaattttgaaagtttgtctacttatgttggattaactatctttggtaaatttgttgacaaggattctattatcagaaaaaagtttttcaatcagggagtgattgtttaccttgttggatttgataccattataagaatatttgatccaaaatattatatcccacaggctctagcagtagtactgcaacattttatgaaaaatgttgaattctgttgtttgacaagatcaaatgttaatgataatgagtctgaagattttacaaatcaatcaacttattcgcaagacatattacagggtaaatatgaaccactgataccaaaagaatggggccataagattaatatattatctaacaatccaaagtatatcaacgtttcatcatctaaaattagaaagcttatggtacctttgcatggaacaaaatcgttaaatgaggaaatattgaatgacttgaaaaaacagttgccaaatcaaataattgaatatatcatacaatcaagcgaaagtaagtctatattttctgcttagtatgtttaatttggcatctctttttcatttttgcaaatatatttatgtattaacaataaaacaatatagattatgcattaatagcaagtatataattatctatcaatgtattgtgcctacttatgaatattaaaaagtttctggacagaaaataaagaataaaaaaattgtataaattttattcagaggtgtagcatcaacagacaagttactagaaagattagttgcccccattttaaatgtggactggttgttgcagtatttggaatgaccgtgacattggctttttcatcactaacttcattttgctgcatatcaatgatcttaccatcttcatccaaactaatagaattttgcttcttgtgtgacgtgcatttgattttccccccacgaataattgatctgccatttagaggtctaatccatttattacaatccatctcagctgatgaagatttaataaaggcactacctttaactaatttaagattaggaaaacttgtatctttgaaacttcctttaaattgaattgcacctccaattgttttcaatttttggaaggtgtcaatactctctaatcttgggttattatcaatgactagcccaccctgaatatctgttacattattaaaatacattttggataaatagttattgtcaataattccaactgttccaccgacagtctctaatgttcctaaatctaaatcaacgcaaccattttcaataaactccaagttagttctgacagtttttaaatttggtaaccaaattgagtgtgcatccctaattgtcatgttttcaacatcttgtaaaaaaggtaattcaatttgcaaatcctttgaatttgcatgaattgtaaattgtgttctaacattgactaagcttgctttaatagtttccaaaaacctgttgttattgatgttaaacgtgtctaattctttaattggatagaacccttccaaattggagatggatgtgtctgaaatgattattgtttcacggaccattatatttggattaatttcaacttgatttaaaattggtagaattttccattgaatagaattaacgtcaatcaaattgggtacttctaaaattactattgatgttaaagagtttaatacaaaatctccattaattttttgtaaatttggggccacaaatttaattaaagtgtcacaattgtctactattaaatggccttgaatggtggttaatttttttaaatctaaaacattttctttatactccgaagtgataatcaaatcattaaagattgtgttgcaatgatctaatattgataaatcactttgtctttcaacgataagactttccattggacataaaatttcatcgttttggactgtattttcttgttgggattctttatcatcttttgtgtcatttcctgttcttttattattatgaatataatgcgggttgttattaaatctttcctgaccggttacatccaaattagacaattcaatattgttaaggttctctgttttgataagatatgataaagaggttgatgaaaataaatttagtaaaataatatttgataatttcattaggaataaatattttgttttgttgtatttctagtctaagtgtttgatactagagcagaaatgataattgaattagtgtaagataaaacagtcaaaaagaaaaaatggattgtaaaataaataagtttgaaattaatgacaagtttgaaccaaattctgtttttattaatattaattggttattaaataatttgtgtcacttgacaaaaatgacaccaatagaagcaaagagaggttagtcagaaaaactcatagagtctcgtgactttgtgccgggtaactataaccaaaaagtgttattgctttattcaaattttgcgactaactggaagattggtaaagcataaataagtttgtggtaccgatttttttattaaataaggacatgtaataatcttaacagggtatttctttttttttttctttaatcaagatatatgtactagtcaatatgataggaacattatatatatatatataatgtttttttatgattcatatacgtggaaaagtattattgacattgaggaaatagactatatggatatataggtttttagtaatattattatttgcttgaaagaacggaaaactgaagtgtatagataaattaataaatagagtcaataaaagaaaaaaaaaatgaagaaacaacaaataggtataacgtaaaaaatattaagtattaaaaaaaattacaactagacgtatatgaatgtgtaaataaaattatataaatacaaaatgaatatatatatgtagaacaattgttcttgaagtatcaacactaccaaacaaattcatttacatatatatatatagatatatctatagtaaccttgagaccactggaaaaaataaatgataacatatcaaagagtcccattaataattgtccactataatataagaaaagttaaaaattattccagaatattagatgaaaaaaatatcaataaaatttgcaaaaagaagaaaattattaagtaaatgaacaatgtaaagccgtatcatttcttattctataagtatatttagtactcagtacttatttattcaacttagaataagaaagcaacaccagcagcaacagcagcaccgaagataccagcgtttaaggtgttggaggcagcggcaccagtagagacagaagagtgagtaccgttggtggcgttagtagcgttggtgacgttagaggccttagaggttttagcagcttgaacagcagcgacggtagcgaaagcagcaacgatagtcttgaattgcatttttttatcttttgtattcttgtgtacgtgtgtttatgtttgctttgtgtctgaatggacaatggaggcaaagagaggcagagggaacaaaattagttaacgtattgaaagggaagaagagatgcaagcgatactgctggagtgtgctcaaatatactgtttcttatatactaaaaaaaaaataaataaataaatgagattgtgtgtaacacaaaattgtatagccatttaaacaccaagctcgataacaacgatatcatcttatccgaaaacagaagggagaatttcttttttttttgttttttttgtctttgcaaaattctattgttttctagaattgtctttgtttgtttacatgaagaagacaaataaaaaagtaagtttgagaaaaagattgaggaattttgttttctatttaggaaattgcagggtctgggagtctagaacattattgtcccgacgtatcgatatttcgcgtagttaatttttgaaaggggaaagtacatcgaatttttaaacagaaaattagtaggaaattttattagcagcgtgacaatacaatagaaaacgtgtctctgtctcaaaagaaattgtggtttcctcaaaaggggagatggatagaaaatctcattgttttgagcaagcaaaggttgttttttttgggggaggctgttctgaataaaggggacacgaaaaattaataaattagatgctgggaatatcaaattttcttttttttttttttcaaaaggggataaagaggtgtatatattggtggaataagtagaggattctttgcttttttttctgaagaaaccctaaaggtaaaaaaacatggtaagcttgggtgtattcgttttcccccttctaacctaaaaaggatttagatttatattaaagaagtcttatttgaaaagataactttcaagtcgattctttataacaaatatgattttttttatctaaatttgtcttaacatttttaatgagaagaaaagtgactttagaggtttgttataatgttttttttaatttttcttttatgtacagtaataaaaatttgaaggtttctaatctttattttttttagatatttttattgccctgtatttgtaggagtgtattatttatgttcttgtgtttaatttttttaagacctatctggaatgaaaaaaaaattcttattttttatgtttttttttttttgattttcaaggccttttcaagtaacggcaataagaaaatattaaattaatttttttttcttttttgtcagtaagaaagacaaaaacaaaaaaagggtttttttaatttctgagtcactcccctcagttcaaaattctccctttaattttcgtgtttaattaataaaatgcttggtttaacccatcgatcaaaattactatttgaggaaattatgtattaattaatcaaaaatccagtttattttgttaaatgatggcgtgcatgcaaaaaggatttaattattactttccattcagtttgatacatcatctttttttttctctccacaaaatatgaataaatgtagaaatcgactctaatttctgagcattttgaaggaaagcaaccaacaaagaataaaatcaaaaaaaaagggatatttacggagttcattaatttgatagtttttaaaggtagtgatgtcctgaaatgatattgctgctttagtataattgtattgttaacttagttgtatcaattagttatacgtacatttacttaattcttttgtttttttttttcattctttcatgactatttttagaggttattccaataggaggggggttctgctagtaaaatacattctatccatactgtactttgaatcaaataaaaaagaatgcctattacttatgtacattacctacctttttttataggcaacttcataaagaaagtgtaagaataagaacaaaaataagaaaataaagggttaaaacattctctatcttaattttgatactattgtcgataatactaaagacactgtgaatcttcattctgagatgtttgttcataatattattccatatatgaataatcactctttttattttgtaagtcaaataagtgtgtacagtttatgagtcaagtgtctctactgaacataataaaaatactcttttattttgtcattttatcaaagaaaacaaaaaaaattgtgctactgctacttctgaaacttgtaaaattgataaataacaagatttttcatttttttttactcctcagaaggtaaaataacaatgaataataactatatttgcttattgagtagggtcatataatataaacgataattcccctctaagtttagtcccatttactatcaataaaataatggaaggtaagtctatagacaactggtctatattgttacagtagaaagaatatttctctgtacatatgtcctagctgatcagttttggtggttgctagtatatgtccttacgtgttctaacatcagtctattgttttttggcttggatagcaaaaaaaaaatccaattgtcctcaacttttctaagctcttgttatttctatattatttacttttttttctttttgcttgttttcattttgggattttaactttttttcttttttaatggaaattatatgtagtatgtggctattgccccgctttgcttttctcaatttttagttgttttttattctactatattgtccgatttattgtattgtatttttttttcgctatttgtaaaaagaaaaagaaataggaagaaaaaaaatggaaataaggcgaagacaaatcaaaaattcttatatttatttattcaatcttgttaactccgtttcttttggaattgttctattcttctagaaaaaaagaaaaaaagaaaaaaaggaaaaaagaaaaaaagaaaaaaagaaaaaaagaaaaaaaggaaaaaaaaagaaagaaagctcgtgtctaaaatattgctaagtgcaaaattttcaaattgacgtgttgtatttatgttttactccaaaataaaaatagtcatttatacatgtatgcacagtaaatttaacctttctattttgtgttttttcccttcattcaataataatagttaattacggcatacaaagtatggattatttttgtgaagatgtagttaaatgacaaaattgaagtaggagggtgcatagcattgatggatattatattattccttatcattgtattgcacacaacatgttggaggttcaaaagcaatactacgactaatacttgttagtaatagggcaccttgggatttattttctaaattataaaaaagaaaaagaaaaagtatttttgttttggatatttcttgaaacagaaaaatataaacaagactgtttttcgtgtttgtttgtttatttgtgtttcatctttccaaacaaaattctcgatataatcccgctctcaaattttgcactgagacatttcctgcctcgatgtcactttctttgtttgtgtacaaaataggaaatttaaaaacagacacaacgcgaataaaaaaaaaactataatgtcgaacagttgtttgatctacttctgatctcttataactcatttataaaaattgatttacaactcaaagactctgacttaacacaaacctataggtgaaaaataatggaagaaaaaaatggaagaaaaaaatgtctcattctgcttagtgtacgcattccccttcctcccccatttaaaaaaataacagctatatcatcaaatttattatgaagaataaagcaaatctggactgcaatctcttagattaaattcaaacacgcattaaattgcagtctgtttgttggttggttggttggttggttttttatctggaaattgaactaatatgtttagttgagatcaagatcagttacagtatcactataaagaggaaaagtgatataaatgttggctaaagacattaagggtttaatacagtcaaaatacgcagaggcacgtgaaaataaagcattgttcttcaatgatggggatacgtccacaaaatgtaattccgagaatgggatgatgtattggatcaggtttgttcctactttgcttacaaaacctgaaaaaggtgacacgccagcaaattctgatccattaggtaaacatgaaccagaattattggttttacaagatatggatgtcgttgaaagggaatacaaattggtcctaaacaaatttccaataatgccaaatcattcactactgattacaaatgcttacaaacaccaaaatgatatgctaattccatcagatttgagtaaatgctacgctttacttcaacaagttgatacagctacagaaagacactttattatttttaattgtggtccagagtccggttcatcccagaatcataaacatttacaattgttgcaattcttagatgggtttgtgccatttcaagatagactatgtaatgatatcgaaccatttttacctagtatgaaactaccacccttgcaagataaatttgtatcctttgcacattttgtagttcctttacctgaattacctacagaagaatatttgatgacttgttacatttctctattcgagcatattttagcatttgtaaaagataataatgaaaaaaatgaacccccagttagttataatttcattcttacaaaagagtggatgtgtcttgttccaagatctagtattagagctcaaactttgccggttgggtttaattccattggttatctagggttggtgattattaaagaagaagacactttactgaaagttaaagagaatcctgatataatagatacattattgttggaatgtgggtttcctaatgctatgaaattgaaacaccaaacattttgatgagaagtgatatttactatttaaaagaaaaaagaaaagaaagaaagaaagaaagaaaaaagagcattgtggtaaatatattattttaaacgtcattttttattgtttgttttttgcatccatatgtacacatgttagtaaataattatatatgtaagtgtgtgtattaatgtataagaagttgtgtaaagactcttttttgcttgaaacacagaatggcgcattatttaaataaattgttgataagtacacttagtctcgattttttcttacggtatcttttttcttgttcattttcagtattatttatatttaactgcacgatgccatcacttatacttctaatttcaaatttacgtaaatcataatttggtgttgtggcttcttttgattttgaaactctggattcagatgattgtggcgattgtatagctctatcaatggttgaatttgcatttgatgtatttttgtcaataggtttactgcttattgaagacgttgttgaatcgatttttaattcgtgattatacatcctggtagtcgtcgttatctttgcagcattggtattttttgtattctgctttgtacgatttatgttattattagaattagtgttggtgttggtattggtgttagtattagtattagtattagtattagtattatctgattgatcgtatcctgtggaagataaatcaacagcatcacctggttcacctaacaatatgtcctctgataatataaatctattagtctcatttagtatatctgtttcatcagtatctgtgaagttagtttgatatatcttgtcgattataatctcttgagtctgattggatgacttcccattatcttggttaagactatcttcattgttatattcaatgtcataaactttactttcaaaattaaaagagtttggtgttccagtatttgccaattttattgtgttggtatcattattcaaatgtttggtatgtgatgattgtgagaaccctttagccaaatgctgtagttgttgttgtccatagaagttgctgggactcatttgacgtcttgtttgatcagtccatgattttttatgaggaattctatatgatacattaccagtgttattattggtggtattagtgctgttatgtgattctataaaagataatttcttatgttcagagtatgatattggagtggaaggtgtattatatggttgtaaagagggggtatttgccggggataaaggtgtctttgaggaattggaagtcaaagaattcatagacgactgttcttttaatgattgagattgaatagtagtggcattggcagtggtactattattgtttggtttgaatttcaaattatttccatgtgatgcaggaatcaatagagggcttgttatattattgggaatattcaattgtttggtgtaatggtaatatctttgtttttgaccttttattctcaatgaattataagtatcacttgtttcagaattagcattatttctgattggactagtgttaacatttcttgatattgattggaatatgggagatgatggtctcattggtgacattaatacagtaggtacattttttccatctttactggccgtatccttgtttgaaggtgtataatttgatctatacctatatttatacgtgtttatgtcagtgatattattgtttggcaaattgttctgttcgttgctgtcaatatcttcttcttcttcaattggattactgtcacaaccgatattgccactactattgctattgatacctattgggtcagacgaatcgaatataatttctagacctgcaggagcagattctgttcttctgtgagatttgaaagaccttggcctagtttttaaaacgtcgtccaggttaatgattgcatcagggacacctttaataggcgaagaaaatttaggttcttcgctgatgaagaatctgggacttgcttggttgaatagatcgttcttttttcttggtgtagttgtaggattcaatagattttgagactctggatcggatattttattggattgtaaaggagaatataatatagtggggttagaaggagtattgtttttcattttatatgtttcagaggaaatgaatgtcgggagaggagggactaaagtaggatcatttgttatatgctttgagacaggagaaaaggaaaaaggttgtgaaggtggtggttgttttaaaaattcgaaatccccagaaatggcaaaggatcttttatgacgatgacctcttcttgaaggggtagctaggtggctgactgaatgttgaacatcaggaatagttaagttttgggtctctgccatagggttgttgcgtatatataggtaatctaatagagtttaatagcttattgttattactattattgtggcgatagtggtggtgattgtggtatatacaaaacaaattatttaacaacctgaaaaaatattgaataagtaagataaaaggaatgaaggacacctaaaataaaatgaaataaacgaaagacaaagaagtagagtagttgattaaatttgtttaattgtgtttctaaataggtcaaaagagggaggataaaaagaacaggagtctggagtgtactttttaccacttattacctatttattgaacaattagaatttttgatggataaaccaaagtgtcttttacaagtacaatagtgtcacaaataaactatgcttggagggtatttgttgattcaaaatgttatagatacagatattgaaggaataatgcaacgagttaagatatgtgtaacgatatattggatacatacacatgtcaacttgaatggtgtctatcaacgatcgatccttttctttggttcctatgtttaggcctctttgctttgaagataacgaagatcctttcccttcgtcaaaaagatcgagacccacaatctcgaagaaaggggacagaggaaaaaggaggaggagagggaaaaagaagcacgtgacaacagtagaggacaggaagaaaaaagaaaaaaatttcatttttgtttttttttttttggattcgagggggttttttttcggggatttaatgaaaataatcctaattcacatgcttttaaccctcatgttgctaaaccctaaaaaaccctgagataccctaagagatttccattagcagtggttgttgcttattatgtttcttattgttggttgtaggtaacatagtagtagttcttaaatgttttttagatattctatggtattttgtaatacaattatatttggtactttgatactcaaatgtatttgaactttggtataggctattgttggtctatacgtctatcaatggcgtgtatatgtgtatatataaatatataaatatattatatcatgtctgttttaaagaagagaattacgctactgtttcaaaccccagaggacatcgtggagggtttaacgagaaatgatgctcagttgattataaaaaaccaaaataaagtcttcattcaaactagatggacaataataaacaataacatagaagaaaacaattcgaatcacttggttcgtatcacttggaaggataaaggatcgttcatagatacccatgatgatgacgatcataacgccaccgaaccatttcacaatcaattagattcaatcattaacactggctttaatgtctatgtaaataattccaatataacatctctaagtgattatccattaataaaaacgcccaaatataaccttttacattctaatactcctttatatgacttatttccaaacatattatctgatactgaattaaatttaattgatccaaacgattttactttaaagacccaattcgatatcttaaagaattctaacatgacagaaattaataaatacgaggtattagagccaaatgatcttttgattattcaacaaaataataataataatagtagtagtagtagtagtagtagtgacaataataatactactacaatatccaatttggaggttggtttattttatatcgattcttttgatgacatcgacactaatatatctgggttaaggtgtctttggaatcaaactgataagattcaaacatgtttgaaaacttctcttttctataaaccattcataactaaacaatacaagaatccctttttacaagtacaattggaagaaccaatcggtttacatccaaaaattctaatagatttatccaattatcatcaagtacagacaaattgtcaatattatttattctctcaattacctttagaattatttatagataaatttcaatctgatccaatctttgtatttggtgaagacgatttggaattacctgaatataaattagttcaaagatcatggggttcagaatttctctaccaattagaacctgggcaagtcaatgaacttattttacattcaagatatctaaatattactactccatacccttctacttttaatgctacatttgatccaatcgtgtttaaggcttgtgataaaaacgctttagatattgttaaaaatcctttttattctaaatctttgggattagaatccttttttacagatgataccaaattcgatttactctattcaacaacattaaacgtgccgattccaagacctgggtatactgattttaataagattcagttgttgactggattgactttattgttttcaatcatttacttaacttggaaagttatccctaaaaagataccaactaaaaaatataaacatgaatgaacaatatatatgtgtgcatgtttatatagacacgtggatataggataaagttgagataaatttgttttaattaaaatttgattttgtttatctctcccacttaaaattttgtatactttaaaagtcaatataactgtatataatgtacaacggtcgattccctaaatttatatatatatatggatatgtagatatggatatggatatggaaaacaacgatagaataatgatttttttaataatatgctattttaattttggtatatattaatttattttttctttttgtgatgttttttagcaatacgtcttaatgctctttgttcattcttcaacacaccatcaaccatcttatatttgcctttaacacctttaggcctaccagatagacctttgaatttacctgtagcatacaccaatgtaactttctgcgtgttcctttgctttttggatactttgcgcatcaatttagcaatttcatctgccttatccttttcagatttatctgaatcatcgttaattaaaccagctttctttttaattctttctaaacgagccactgcacgcatcttctttctggctttagcttcggccactttcttaattggacgagcatttaatgctttcatcttttcttttaatgccaatacagcctctttagtaattggtctattaattttagagtgttgtttttcatcttcaatgaaccatgcaggtaaattttcagtgtcacggaatgtgtatctattaaaaccttcatctattaaatcgtgtttagtcttttgtccagatgctagctgatgtgccaaagtcatagcctctgcagtagcaatatctaagtctcttgcatgtttagctttagatgataattttaattcttcttcagactcataatcagagtcaatatctccataatcagagtcttcattagctacaatttcaaaatcagaattgtcagatgaatcattgctttcacctgataatttaccctcatcactattcttgttatttgtcaccgtagaattattatcagctttcatttgatcgtaagttctcttcatattgatctttgatgtatcaccaacagattctgaggatataccttcttctcttggaatggctaggtctgcagtaacaccatcaaaaataggatcattgaaaagcatacgagccttttgactcaatttatggtcaccagacttaccctttagtctacttattaaattattaattgcttcatcgtcatctgaatcagataattcagtatcgtcatcatcatttatataatcgttttgttgttcattagttgtgtcctcattctttgtttcatcagtaaagcctgtccattcgtcgtcatcgtcacccccacgagccattttagctctgtaattagcatttctttcggcttttctagccttgtaattttcatacatggaatctaattgagcttctaagttatcagtttcaacatacttatcatattcatagacttctgtatcatctatatgaatatcattatcattagctaattcaccttcggtgaaaaccattctctttttacctttagccaattcatttaatataccagtcttctcagcggattttaagttgaataaagaatctttaccaacattagcagcttcaataccaatatctctaggtgttaacatgttcatctgcattctaattatttccttctgtttgctttcatttttctttctcttctcacgttttaattgtagacgttttttctcctgtaattcttgtaattctttttcaatttgctcttcttcagtcaaaggagtttccattattgcctccttttcttcttctttatctaaacctaaaagatctctagcatttttacgccatcttaatatcattttaaaatcttttttacccaagactttcaaatcttcaatacaagctaacaattctttattggtttgtttcatctttttgataattttccattcatggtcatcatttattatatcaaatttattcatgtaaccaagcatattaattggatcgtctgttttaataaaatccatgattggagtagtatgatataataaattatcaccctcttcataaccttctctctttctagttttcttttcgggattatagattttagcctgcatattctgtggaccatctggtaattcttcaaagacttcctttggatctagtaatcttgggtcaatttttttaggagccttaaaacctttacacacgacaaaaatttctgcagacacatttcttgatgctggaggttttgtggcttctaccttgtcaaagaattgttgaaacacccaaattaatttattataatccttcgacctgaaaactttagtcacaaaagtaccattaactaccaaattttcaacggctaattttagagcttgtaaagtcagttgagattgagtgaaagcatcttgaacccaacctaaacccacattaggagcaccatcatgcaagacagtatctgccttccatgttttcatataaccccttaatttagatctacaatcctcagtagtaatatcactttggaaagtaatgacatttggcataggtttcataggaacaatgtctacaccaataattaaggaatttacaggacataattttgttgcaacttgacaccaagaacctggcgcagcacataaatcaataaccacttttgatttttctaagaaatggccaaatttctcattgatttgaataatcttgaaagaagaacgggcacgataacctttctctttggctaaataatagtatctatctaaacgacctttactattttttttttgagtcttacccatttggaacttctttttggttgttgttgaatctttaggttaattttgtttaaaagctgatcaccatgatataaaataatattattttagtgttttgtttttatagttccttaatgaatatatatattttttatgaaattttgagatgctcatcgcaatattagaaattttattctggagaaaaattgactataggaaggttacccgcatatctacgagaatctcatattgtttttatcaatctttgttaatgtagttaattttttccgtcatatttcgaaattcttaatctgtgtttcgtgtaaaagtatatatttttcgagataatataagttcatcttatatacaaaatgagatgcaggaagtgctaggaaaaaaattcaagataagtaatgttcaactgtagatacctgagtttgtatgtatttaattattctggcttttaaaatgttattagggaaattatatcaaaaatattaatctatgatattagtcaaagcttatttcaacaaatatttgatagaaaggaaatcttaacgctaccatttttaagatcatcgaatgattggaagaaagtagctggtgacttatagaaggtggataggttttgtgtaatatattatttgtttttgtagaagatataaagaagttgataaatgggattgcatttttttagttaacattttgggaatatataaaaagtataaaaactttttgattcataatgagttgaattatcatattttattgtatttttgagagtggtttgaacactgtcaaaaatgtggagggttttatttttttgttgagaattagcacttgcatatcttggataaagtgagtgcattcttagttatattctataattcttacgtagttaatagtatcaaaaactagactaaagttttttcctgagtattttttttacacaagatagaaataataatcaaaagtagtagataaaataaaataaaataatagaaggaaacttttagctctatatatgttaatattaagtattttatttctatgaatagtaaaaaatttatcagataattttatcaaggttttatgatctgtatagaataaatatccaatattttacttttttaatatttattgaaatttcattgttctatctattttattctagtatgccttattttagtaatttttgtttgaaataatatcttttttttttttgatattttacatttatttcaattttttccaaatcgaacctttcttaagaaatagaacttattataaaataataaacaaatcttttaacctaaaaaaatagaaatctgtatatgactataaaatacatccaaatatactactcaaatgtattttcaaaaaattcaaattcctttttgtctaaatatttcttaatgaaaccttaataataatattatatatgaaaaaaaagaaaaaattctttcttaactgtcactattacttagtaagtatggtttttataaactgtaaatatgattcaacatattattatttttttaactaacttcaatcaggagtttttattcaaaatgaattaacatgaaattatcaggttgaagatcaccttataaatggaaatacaaatttaccaagcataatatcattttaccctcaacataaataaaaacacaatatacttcctttaaacataaacaccaatgaaaacaaaaattttattctataaaaagaaaagttattccgttaatctacagttgattgcttataccctgtcatttatgatgtaattagtgggaaaaacattttgacatactttatatttaaggttacattatgttccagttacaataacatctgctggattgatatattaccgatttgagtaacatgtaaatatatcaaagaagaaaaatgtttgttttgcacattcaacgttatggagataagatcaaacagaatcaaaataaattaatatattatgaaaaattgccaaaaggtaaacatatataagtagacaactttacttattaattttccaatctggatgaataatatatatacatcgtatctttatgtttcttgtatatttatataattattaattcccaatcaagagattgagggaaaattacactacatatcaatataataataatacacaataataacatattgtatgatcaccgacgctaagaacatgtatactaatattattcagccagaggaacatcagaacaggattaaagtataaaatatttattaaagataaattgtttggggaactggggttttttaacgatatttatttagtttataaatatttagtaatttctctgaatgaaggatttttttatacgtcagatttgccttgtactaggtcataatgtcatgagccatattggctatattcaatattatttattataaaatagtcattctaatatgcattgattaaaaggaatccgctttaatctttttctagtagataaacaaaatatgaagatatacaacatagataaaatgatatactgcaacttctttatccagattagaaatatataagtaaagttgcttcttcaaatgttctataatctcaataaattatattgtgtagaatatcttgtctactatgaattgtatattacgcatacttctaattagccgaataaattatttatataagacgtatgtcttattaagagtacaaactaatatggactaaaaaaatatttttacaagcaaatagttcgtagcaaataatttgtttattttacattacaaataaaattgttctatttttccaattataataactggaaaatgttttcccattttgcattgaataataataaatattcttcaaattatgaaagaataaacatgaaaatattcgtgctttctcagaataatatttactgaaaattttttaaaaatcctcaattttcaaagaagaataacaatttcttttttgggagaaccaaatacagatgtttcaataaaatagcacaaatcactattgtatatataaatcaacaatgttaatttttaatacatttcgttgcatatgacattatttccaaattaagatatttacatggtttgcaacatttatttaaaaaaaaaatagtgaaaccaattaatgaggtttttttattaaaaaaaaactagacactattattttcaacttaagaagaagtaaaattttgtattgttttattaatttcaatcaacaaaatattcttactctatatatacttaaaaaaataaaagatgaatggttacacagtcaactaaaatttttttgtcttttgaatctttaaattttttttagatattaagctatgaaaaaagttttgattttacggcaaattcgtttattttgtttattttgtttattttgtttattttgtttattttgtttattttgtttattttgtttattttgtttattttgtttatttttgcatctcctgttatttattcttcttgatttctctccagtcctttgattattctgtttatacaacccaatgcacttacttcaccaaatttatataattcctaatattagacatttccaatgagtattaatgtaattgtaagtttacttatattaactttgcgttcctacttccagttatgcagatatatattagcctatttgacgatgataaaattatattgataatatttttctttttttagcaatatttactgtttatgctactaaatattgccatttccccactaagataggaactttaaatgatacttactctcttaatgttcatttatcaatatttagtcagtaatttcaatattaattttcgtagaaaagaataagttatctattttagaggatattatttagacacaggactttttggtctaaggatctcaatctcattttttaatgggacattataaccaatctttgcaatatcacttttgtatttcttaggcctgaaattattcatcaaaatatctggactcataatcacccaaccaggtctcaacctaactggagtctcaaacccagtcctagctggtataatatgcagtcttctagtggcagttgaaaaattttctgcaattttatatagatgggagggcactgcgctattacatgtctctttagtctcaatagttaaatcggtatcaacattacaatggattaaatgtccatcagtagaacgtctaacagtaccagtgatacacatccagcagtgccattgcatcttttctaggactgatgaatcatcaacatctagtcctgggtaaaatggagaatttttatcaatgggaacaaatattaattcttcactccgtctaaattttttagcccaaatttcgttatttaaaagtttacttaactcgtttatcttatgaacacttgcccaaataaataaaaaacctggttttgatatgagtttatccaaaggcaactgagtcagcagaggataaataagttgattatcagtaagacatccaatcatcactacatcaaatgatagtttatcattctgtatccatttatttaatgttggaatcatttcatctatatcaactttacaaccatatggctttgttgcatagttagcaatttgtctagatttttctttaaacaatttttgtagctttggatagccttcaactgtattttctatattagtcacatgtttctgtggatatgaatttgaatgaatataattgtttgaataatcattattatataaaactttcattggcctaaaatcaacatgtcttaatgatcttatggaatcttcagactttctttgaacagatggcatttctatttgagacattttattggtagagcagagtgtcaatatttatatattaaagtgtttagataacctatgggatggttttttgtatactattaattattgatgtaactttagaatactataaaaaaaccaatctacaatgaaaagaaatattcttgcacaaataactgtattattatatatttctttgtctaattgaacctggctccatttattgatttattttgaaccaaaactgtattgtatcacataatattgtagcacatttcacaatctgatcttaccttcttgtttctgatagcttttcccagttttgtttcagatcttgacatgatatcttttggctctaccatattcttatttttttttttacagaattgaggaaaatttgtttcagcgcgtttcactgtggtaacttcatttccaaaattataataagtgggtccagcagacaaaaatagtaagatccaatgaaaaactgctataaaacagaaatacctcccactatatgactatatcctgctgagaaaagaagcctatgtatataaataacatattctgttataaataaatattatttagtactctttttcttgatttatccatttatatacttacaaatcgctttataatctaacagcaacacctgaatcaatgccagaattcgactatgaaaaccacccgaaatgatgcgactgcttaatacggttctaataaaagaaaaaatccaccaattctgtaaattctatggtattcaaacctaaaatacccatgtatttattaaaaaaaaagatcaaatataaaaaaaaaacattgtgtatttataaacctcccagatagaaagaataaaaagaacatgcctttttacctaaaataaaaacttaaaaattgaaataaaaatctattaataaagaatataacacgaagtccgatatcaaaatacgctattacgcctattcatgaaaatacctaccatcctctagttctttgatagcctcttcaaccacctcatcatcatcatcatcttccatgacctcaattgcactatattttatcatatcccaacgtttccaaaacactattgagtcatcaagttgcatcgaatcatatacctgttccaaatcatttttggctttactcaatcttaacttcaatgattctaatctaactgaatctggtaatttagacacagtacgatattcagaacctgaatctgtctcatattcagtgacttctgttttatacccatcctcatcctcctcattccttatactagcattagatttatattgtccttgttgcccatctgctatattcatcttgtgatcaaaaatctgatcatcttcttgttcatcatcggaatactgtatggatttattacagtaaattcttgtttgtttgtttgtaattctagtatttgatacaacaggatgtgtctgtttttttactatattccaactatcatacatatcaacttcagcagatgatgtagtgtcacaatagcgtgcccaaacttcatctatggcttgaacaatataatcaaaacatctttctcttgcaataagatccgcctttggtagatgatttttcttgctcatattgatgttgctgatatcattgacatatgattccaaatcatcattattcacaataagagaatttattgattggctgtttccatgatcatggttattacaaatgctatttttactattattacaagggtatgaaaaggaactaggtctattcatgattaaatttcttttacctgaattgaaatgaaagtaattattatttttataagcagaagcaatatcaaaatcatcactattgtagttaacagtatcatcaaagtcactgtcattagccttgtgtgtatttaacttcccatcatcagcacacctgtttaaatatagtaaagatgtcgaagataaaagagaggaaggagacaaagatgaagttgaagataaagtgcgtctctttgatattttaaaggaattagaaataccaggtgatgaagaatgctttataaatcgtggaatattattattagtggaatattgacaattatttggatgatcactacaggtatcactatttccggataaggaaagacaattagaatatggcctttttgaagtggacattaccatttttttttatttttgttttttcaaagtacgatatcagataaatcaaaattaaacaaaaaatgaaataaaaaaaataatgaggatattatattttatctattagttctatttttttttgtacaaagtaaaatggaatacctaaatattctttttaaatgaagatacaaaaaatctaaaaaaaaaaaagcactattttttggaattattaagagcagctcaatgaaggcgtccaaataaataaacaaaaaaacaaaataataaaatataaataggaggaatgaaaaatccaatcaaactaggtttattaaagtaatgaaataaaactttaatgttataatataactagactacgaataatgttttgcagtttttagtgtaaattgtttgatgtgacagcacggttttatagtgttttaaccaaagaaaagagatcaatataccaatggtagaaatgtgttaacgattaagggaaaaaagtaaaaagaaaaggaaagaatgttctgcaccctataactaatgctagaaccttactaacaataaacactgcaaattggaaagccctataaaacaaaatagaaaaaaagaaagcaaagaaactcaacaaagaaaccaaaccaagagagtgcaagttggaaaaagaaaaagaaaagtaagttaaagctgaagaaaacaaccaaagtcagctgcaaagtggtgtaaaaaatgaaggagttgacaactccttaatgtaattgataaaaattccaaattcacagcgcggaaaacttgcacgcaattggtcagaagtcacgtgactaacgggtaaccccctcagaccaaaaaattcaaaagaggaatattgcatttttccaccgtaggaaatgaccaaaaaatcctccctcgaccacaaccagggaagtcctaccatataaactatataattttacatactactaaatccatagccaagaaaaattatctgtttatggcacctgtcactatgaccagacgttgctttcaatgtatataaccaataatttgcctagtttgtttattccatccttctctttgccaatactatcgctatcttccaacgaaacgccacttatatcgtggaaacggaagaaccagcacacaattttagctatcgtattttttttaaaaaaaaagaagtgaaaatttcataagccctaatccacatatacagcagttccagaaatttaatgtaaaaaaaaactaacataaagagaatttgtcaaaccctaatattgaataatatcccactcaaatgaatctagctatctcattttaaacaacaatggtatagctattgagatgtttagtaaacaaaaatagtatactcactattgaccactgtaaacagatccatattcaaacaatggaacagcattattcaacagactttcccagttaaccaactacttgtcagagtaaacaaaaaaccaaccaggaaaagaaaaatacaagtgaataaagaaatggcactttctaacaatttagcaaaatcatcaacggacttcataaaattttaaattgggtaacaatcacaataacaataaaaaccaatataaataaaacatcatttgtaaccaatagataaatttcctacttctctcttaacttttttaattaatttaaaatgcatgtcatgaagaaaaataaagagatatatctactgaaacctctcattaatactttctgtaggaaaaataaatataaaaagcaaacaaatactgataccatttaaaccacacaaaagtggtcgtggttttgtgcaataatacatgtagttatcaaatcattacattagaaacttatacgctttctatcactcctaaacaccttcactgactatcctatatgatcattactgtaatttgcttgacaaatgcatagagcttacatcctctattccgtatttccaaatagtgaattaatcatatctctactttcatactaaaaaaaattccttagtaaccaaaatgaaaccaaatatataactaacagcgatacccatagcgttgatggaaggaaagtcttatgtcctgctatgactaacggaagtaacatatcgtcttagattcaaaatttcgtagtacattgtaagttagtctccttttaactgtaaaaagtaaggggccattatcttttccaattcctcttccaactttacttgtttattgatttgtgtattcttaaagaaactaaaaaacagtcccggatcggagataaataaatattgttgatgactctctctctattttttgccatttctgtcttttttcttttttgtctggttttttttttgttcatttcttcaattatcattgatgacttaccggaaacggcaaaagcaacaattactattattactatgatcaatacgattcaattgataaaataaaatgattaaaaggaaaacatattaatagtagcgagtagaaatacagactagatactgtacaccattacacatacatatataaaacttccactattgaggccaatttatgttagttacacctaacctaagataaaataaaattaaaagaagaagagtagtttagaatattagaatgattgaatattctgatgatatagaatatattataacagagccagaagcttttgattccaccaaaactcattcgatcgagaatgtcttagtaaatagtattaatactatttcaaatatttttgactatttatacttttttagaagtattgggttgataaaggacacaaattttctttataggaatttaaataagggtcattgggggtccaaattttggtccttatcattagtattcgcaattaagaagtctataaataattgctggaaattatttaaatataaagtcaaattgaatttttatattcaaaatttcgactccatcaaaaatcagtcagcttcacctgtaaatggaataattctaaataaactgaaactaaaattaaacaaaataaattctttactctttgaacatatgtttgaaattttacaaaacttattttacttcataatatcaatactcgacattttgaaaaatgtaactgccttcaatataccaaaagataaatgggagcattttagacatctggtggaaactgtatcaaacttactcacgatattcagattctccgtcaatagttataatgttttaaaaataattcattaatattgtattaatagagacaatatatatacatatgcacacacatttatatatttttatgtgatatcatataccaatacactaattttgtaaacctagttccttcaagaaagcatccttagatggctctctacctagaaattcttttaaattagcatcaatttcgtataatccaccattaccaagtacaatatctctgtatttaataccaactgaactatctaatggatttggagaaaatttggtatgatacatatctgctgcaaacacttcagcccacatgtaaccataatacccagctgagtaagaatctgacataatgtgaccaaaggaatcatatcctttgctatagacaccaccattttcaacaagacagatctcttcgcgagattcattccataactttaacaaatcaagagattcaatatcacttgtggtatggactttcatgtcaaagagaccgaaatgtaattgccttaaggcaaataaggcaccattgacatgtttagtagtaatcaatgaatctaataaatctttgctaattttttcacctgtctcgtaatgcttagataaatcataaagacaattcttatcccatgtataaaactccaacatttgagatggggcttcaacaaaatcccacggtgttgcgcttggtccgttaaatctaccaatcttattcctaccaaccaaatcatgaataccatgccctaattcatggaagaaagtagtaacctcattgtgttttaacaatgccggttttgtggccgttgattttgagaaattacataccaacgcagtgattggataaaatttaacaccatcttcgaaattgtagaatgctgaggatataccgaagttggccgcatgtccatacttaccatcacgtggatgtaaatcaaaataaatccaaccgataaattctggtctgtttggatcatctactttccaaacagccaattgcttaacatcttcatgccagactcttttcttagattctgaaatttcttcaataaatttcaatttaaaaacagtctcataaatctttaacatacccttaatagtagaatctacaggataaaattcagcaatcttttctaaatcaacattgtagttatcctttaggtatttattgtcatagtaacgatgatcccagacataataatgtccatcaaagggaatacctatttcttcacattcgcgttccttcaaagctttcaaaatctcaatttctttctttgctagaggtttcaacctatctttcaaatcagtcaaaaattcgagcacagtttcttgatttttagccatcttaatatccaaattataattggcataagaggaataaccgagcaatgaagccagttgatttcttaatttcaatgtttcaataaacaatttttcattttctggaaccttattttgatcgccgttgaatgcaatttctcttgtctttggattcttagctgtcttcaagacaggaaagatatcagggtatttgaaagtcactttatattttaagatgccatctttttcaactttttcgaactgttccaagaccgaatcagagacaccatccaattcctctttagtaaacaataaaaactcttgttgttccccaagattctttgaaaactccaaagatttagacccgatctgaatcttgatatccttaaccttatctcttatttcctctggcaaattcaacccggaacgaatgtaatccttatgacatttctcaacaaatctatatagttcatactggcctctatctcttatatattgctctttatcgtctttaatctgttgccagatcttgtcgaattgtttgaatattttgtatcttagagaaatttcgatctcgaatttttgtaacaattcggtagcttcgttagacgcgtccctaatcgacttgtttgaggagacatgttgtaggaaacatagctggttgattaaaggggtcactttattttcttggatcatgaaaggtttaacaaaattttcgaatgttggatcttcgatcgattccaattggtcatagagtttagtggtattgtcaataacacaattggcatcgaatataattctttcaggggtccagttccatgaaggtggtatactgggtgcgataaaatcgttttgcattgtggatttattcttagtaatagtagaatactgtttatatacaatgagagaaccctttcttgaacagttaagtttatctaaggaaactttataaaatttagataaaggaaaagtgtgatttgaaattgatgtcttgatagtagaagcgatagcagtagtagcagtacttgttgcaaaattacgtgttattataaatggtacacttttttttaaaaacattcaattattaacaataaagtatgtttgtatattgtttgtgccccacggttaataaataaaagcaaccaatattacaaacctatgaaaaagagtacccggtgtctttcgttttatatgttatcttatcttattttatcttgtctttacttacttttgtcgagtaattaattatcattttatctattgttaacttggaacaatctgctcttttttaaatgtcgaaaataaaaaaaaaaaaacagaacgacaacaacaataataatatattgctacaaatggccaagtatcaaaatgaatgttatgaagttatatggtagaattaataagtaatcttataagttccaaagtaagaacaagaagaagatcaagaagtattacggctactgtgatttactgccacatacatgattgtacataccctattgttgcagattaattagcacaaaatgtgaagttaagtatgctactaattccgtttctctaacagtaaatactacgacatcttctacaacttacttctatatatctgaagataatgccatatacatgtatacccgattgtctcaacctgtcactaagacaaaagtaatccacagtcatgatacatacgtccatctccttgaactgaaccactacctacatgcattgtccttgcaataacataatacaacatttacattgcataacttaacacaacacgaccagtcaacaaacctacattggcaacatcccatctcattcttggaattttacagattagtcaacagttttttctcttctttctttcctggcagattccccacagcctgggaaaccgcacaaaataaaccaatcaaaaatcaccacacgccatctgccattgttttagaacaaagctagaaaaataacaaaaaccaaaactgaaaacaaaacaaaacaaaacaaatcaaaaaagacaaaatccgggaaaaagttaactcttgaatttttgtatgtaaagtttaagtaatagaacctgccccagaccctcgataactcccggaccctttgtgcttccccctctctcctttcttccaggccaatttctcttttttggtttagttgtcttctgcaaacttcgtatacttttattcaatagagttaaagaaggggatgacttggcaatgttagaggactgatagaactgctaagtgagctgttgcttatagagtccgggctactgagataatagtgtcgtttttgctaacaaaaaaaataaaaaaagaaaaaaaaaaagtcaatctaaactctggtttgaatcagcaacataaagaccatcagtttattattctagaataaacaaaccataggcttaaaaaagaatatacatatatacatatacatataaatatacgtatttaataaaaatgtcagaagagagtgaacctgttcaaattactaaggaatgccataaaaattgtcatatgactcaacaattgactaaaactatcgatagatccctattaaatgataagtgggatattgtactttctaacatgctagttaagattggaatgggcttcggtgttggcgttataacatctgtgctattttttaagaaaagaactttccctgtttggctcggcatcggctttggtttaggtagaggctattccgaaggtgatgctatttttaggtctactgctggacttagagctgttaaagtataatgccattttaccactgctactactactactactaaataataataataataataataacaataataataataataacaataataataataacgataacagtattcatcatcacgatgactattgcactacactacacatatgtacatatactataacaaacaaacaaacaaacaaacaactgaataaacaactgaataaactttcaatataaacaagtaaaaattatatatatatataatattcttctcctccttttttttacattaaataaaaataacagtaataatattaaaatttgaaaacaaataaacaaacctatatttccaattattataacgccatatacaaatacagacatatatatatacatatatgtgtatacattccttattatttaaccaacaaacccaagtaaatttgaaaaatataacaaaaaaaaaatttctattactattattattattaatgcaaaatattacaatgaaaatccagatatcatttcaatttgttttgaaatactattctctgcctcttttttttctttctctattctttcctgtattattttatctttcttttgatcatggatcaacctttttgtatgcaatgctttgatcttcatatttttcgaattatcttgtgaatttctactattgctattattatgatcagatataactttctcaagtatggctccatcaatttccttcatatctataagtttattcatttgttcaactttaaacttatttttcttcctatctgaatataatatcacatttttattattcttggtttttttattattctttctattctttcttttatccgttactatgtttgacctacccattcttactcaaatataatatttaacaaacacaccaacacatacagacacagacacacacttttatatatataaacaagtgattctgttgtctatattaaaatgacttttcaccttttcttaggtctaaaatatcgaataattaatcaattaacaaattattgaaacctaattaactcgaaagccaacatcatatccgtgtacattacaaacctatccatcctctttgcatttttcttttgtctgccatcagttttctagctcgtcttatcttcacgctacttttttttgaaattttcatgagaaattttttatctagaacaaaacagaaatgagaaatcagggaagaaaaattttcattttttttctgtgcgaaaaagaaaaagagagagagaaaggaataaagaaagagaaacagtgatgagctttgaagtttgcttattcaccatgtttaacttttagctgtgtctaagtaacgcgactgttatatattagtagggtctcgaaacaccagtttcatttgtccacattttgctcctattgcacatacacataaacatatacatatatatacatatatatacatatatacataattgatccatacgcacagctaggataggtacataagtaatggtttccacttataataaggataagccttgggatacaccagatatagataaatggaaaattgaggaattcaaaccagaagataatgcatctggtttaccatttgctgaagaatccagtttcatgactctatttccaaaatacagagaaagctatttgaaatcagtttggagcgatgttacaaaagcactcgattctcattacataacatgtatattagatttggtggaaggttccatgactgttaaaactacaagaaagacttatgaccctgctatcatcttgaaagcccgtgacttgatcaaacttttggctcgttctgttccatttccacaagctgttaagatacttcaagatgatgtggcttgtgatgtcataaagatcggtaattttgtcaccaataaggaaagatttgttaagagaagacaacgtcttgttggtccaaatggtaacacacttaaagctttagaattattaaccaagtgctatattttagttcaaggtaatactgtgagtgcaatgggtccatataaaggtttaaaggaagtccgtcgtgtggttgaagactgtatgaaaaatatccatccaatctatcatattaaagaattgatgattaaaagagagctatctaaaaaacccgaactggctaatgaggactggtccaggttcttgccaatgttcaagaaaagaaatgttgcacgtaagaaaccaaagaagataaagactgaaaagaaggtctacactccattcccacctgctcaattaccgagaaaggtcgatttggaaattgaaagtggtgaatatttcttaagcaaaagagaaaaggagatgaagaaattggaagaacgtaaagaaagacaagctgaaaagcaaatcgaaaaagagaaagacagagcaaaagattttgtggctccaaaggaaaaagattacactggatctttaacaaaatctaaaaagaataagaaaagaaatgcagatgcagaagaagactcgaaagatgaaaagaaaagctcaaagaaacataaaaaaatatgagaagaaacatatttacacatatttactgacactgtacaatagtaaatgacaaagggaggaagaggggaggaattataggcatacccatacatccatccccacacatatatttatctttatattgtatataggtatggaatctataaattaaatatcacatagttgcacatccatctttgttgatatagcctgcacaaagacaatgcattttacctcattttattcttgttccaagtatgtgtgtttcacaccaaataaaattggtactttctttcaaaacacgtaaactatttttaaaaaaaaaaaattcataaagacgcgaaaataaattaaaaatattatatgaaactacaaggacttttacccaacttaaaatagctcgatacaactcttttcatcaggaaggattgaaactacaaagacaacgaagaatatattctcaatacactctacatcatatgataataacgtgcaaatattaaagataaacaaaacaacaaaggaccattatattgtaataagtcattaaatttgaatcatggatatacttttcaaggaattaggatcaataaagactaaaaaaagaacaacttataaaaaaaaaacagaacctaatgaggatgaagaacaggaacttccatctgttgataacctggataatggatttttatttcataattcaacgttagagaaagttaagaaaagactagctaatgacagtaatgaagcttcttccattagtatagaaaccaataaggaatctcctatatcagaaaatgatataaatagtagcaaatatcctgtaatatcagaagatattcaattatctcaaactcagttgttaaaaagtatgtacggtggtgaagacttagaatcaattgaaaagaaacaacaagaagaaagaagaaaaaaagaggtcaaagaatttaacaaaaagaaaagagaagctaaacgtagacaacgtgaggaggctaaaagagaacaagaattatttaatgccactcaaattatttatcaaaaatacgatcttaggtccaaaaacaggtatagacatcataatagaactattgacacatcgcgtagtattgaagaaacattccaagagctagaaaaggaggcacacaaagcagaaattagatacgctagtacaagtaaaactagtgatcatgttgatgatgatgaaaagaatgatgagattccattatcccaaactgagatacctttattccaagaaaagcaaaagtttgttcaaaagtcacatgaggcaggtctagagagctccttaagtgtatcccatatacaaaatcaaaacctctccaaacctctaacacaagctacccaaataaatggcggtgaccatgaaacaaaacaattttcaattgatgactctactaagcatataactaaaaatattcagcaatcttctgttcacaatgagttttatccatcaaagacccaaataataccaaatgaagacttacagtatgatataccaagtagtttgaaggtcaatgagagtaattcgatagtacctttagaaactgatacggaaacacaagtatttgacccaataaataaaaaaatacaaaaaatatccactatagaggacacatcagtatctgaagataaacataatggtctcccaaacatgagtagcaatcctacacagtctatcccactttttagctttactcaaagaataataccctctgaagctatacaagaaccgaatcattcttatgacagttcaactcaaattataagtaaccctagagaagctaaccttttagagaataaccaacaaaagcaatatatggaagaaaatgatgacgaaactactcagccgacacaagtaattaccactcaaacaactcaaaatatcaatattatagaattcacacaacctacacaagaaatctcccatacagaagcaacccaaattactcaagtgactcactcttttccgaatagagatactccgaatgaagtaacactcacactagctgatacagttgtatctaacatgaatataacagcaacaattgcagatgatgccaccaaaaaccttaaaatacatgagattcaaagacagttagaaaaagaagaagaagaagaattcaataaaaaaaatagcgaatatagaaagattgtaccaactgttagtagaaagctaaactttacaaaagattcatttttagcaaattttgacagtgattcctcagaatcagaaactgaagaacaaacgttgaaggacaaatctttgaatagcacgtctttgttaaactcagatgttaaaaatagtgacataagtagcaggaacgaatttaataaaaaattaagtggtttagtaatctatacaacaaatctaaaaactcagatggatgctaaaaataaaataaatttggattcagatggagattcagatgaagatttggatagagatttcaatggagttatttcaaataatgcaaaggcaactattttaaatatcagagcaagattatctaagaccaaaaaaaagaacccagaggtgaataataaaaataacttggataatcttttggagaatttaagaaagaaaagtaggcaacaaattttagattatcaatctgaactaatggagaataaaggtctaacaaaaatggacttagagaaagaaaaagaagttgttgaaaatttgttagaacaagaaattcttagaaatcaaaaaataagacaaagagagaaggaaagggaaaagcaaaaacaacaaactgagaatatagatttgaattttgatcatagtgctaatgaattagaagagtctgattttttggatgaagatgatgattatgatgcaaataaaactggaaattctaattccgaaggcgaaccaaatcgtcatgatgagaatgatctagataatgaaaaaattgaagctcaaaagatagatgataataataaagaagaaaaagaagacgaggaggaggaagaagaagaagaaaattttcaattacttaaatccaaaaaatccaaacacatacatgtctctgcagattcagaatcggatcataattctgaggtcgaaataacagaagttccaaccacaaacaaaccaacacaaaatgtggatatcaaagaccgtcccaacgcaattttcttaggtcattatggggataaccttgataatattacctcagatattgacagccaagataatccaactaagaagagtgaaaacgagattactgaactaaacgaggaaacccatgaggatagaataaaaacaatgattgaggaacataaacatcaacaaagattaaaagagaaaaaattaaaagcaagaaaaaaagaacttgaaagttttgccaatttagtggaagaggaggctgaagaatccgaagatgaatggcatggtattggtggtattgatggagaagactctgatgaatacgactctgaaattgaaaaaatgattgacgattattcaaaaacagatatgaatattgacgacattcgaaaaactttattagaagaaaacagaaatatggatataaaaatgattaataaaattctttatgatatcaagaatggtaatctcaggaaaagaggaagatctgctttagatttggaaataagtgatgatgaagatgatgaattacgtaattaccgtttaaaaagaagagaattaatgaaacaaaggttgttagatttaggtgataaccaaaaattagtggaaaatccaaaggctaaagccttctttgatagtttagtagaagatattatcgaaataaaaaacccatttagccatgttgaagaatttgaccaaacaatgcaatcatccacctcatcatcggaagacgatgatgatgtatctgtgaaccaagtttctatggaaaagaaagctataattagtcatgaatcccagaataaaaaacttgttctttcagaggctttcgttcaaaaaagcctttcatttcttaacagtaataaagatttagatgaatatgaaagaaacaaggaattggcacgtttacaacacggagaagatgtggaagatctatttactttaaaacaaaacagctcaattaaatcttttagatctttaacaagcattcaaaaggcaatcactttggatgatgataacgacgagacagatataggtatatttaaatcatcaagacctccatcaattatccaatctttcaacatcaaggcagatattaatgataaattcaaggaaggtagtaaaacagtcaagatatcaaaatcctataaaacagttggtggctccaaagcatccattacctacatgggaaaagctcgaaaattagtggcacccaaaacaaactctaaaaacaatccactacaacgtcttcgcaagaataattccaattcaagaatcagtaagcttttcaataatgaaatgagcaattttggaaattaatagttttccttcatatactatactatagcatatacatatttgcatacataaacacctatataactggtaaatatatcaacgcatcaattctacataatatcattattatcaatagcgtaagtacccctctagccatgtacacacagctaaaacgttttcctctttcttgctgccaattatatgtaccactatcactgctcacttctcctaacaattttgaaaaccagacaaatggagaattttgacgttgttatttttgctgaagcaaaaaaaaaagaacaaaataaaaaacaaaaaaaaaaaaaacaataggacactaagttagaaagaaagaaaaagaaagagaacttaaataatacccaccatatatgaacctattattctacacaattacttttgatatttccgatcaaatactctataaatgaccaaacacatacagaagcatacatgatgttatctgaaaaagatagaaacattttacaaaaattttctagagtccaaaatgcatgtgctcaattgaaaaatgctattacagttatatatgaaaacgcattatccaatgaagaattagctagtatgaatagtggttctgatactgaaagatctgtagccactgctgctgcttctatgatctctacatatttggctaacgctagaacttcagttgatatcatcaaaatctgtgattattataaatatgaaaatgacatttccaacaagatcccatacttcaaacaaccaataattagcgatagcactttagaaaacttaattttcatggataaacatttaactaaatcacacggtactaaaacaaacgatactcttaaattcgttggggaaactgaattacaagctttaatctcttatagcttatccaagaaattcccagcagctgatgaagaaactctagaaaagttgaaagaatacttattatctgatagaattttaaaaaattgggctagtaatatgactattttagaaagagttccttccttagctgccaaagttaagccaaatattacaaaccaggaaattgaggatcttcaagttgatatatttaaagcttacattggtgcattgatcttagatagaggcaatctaggtttagatgatgtttacagatggattgaaagactagtatctgttaaaatacaactattaaaatttagtaatctaagaggcttatatgctaatgatctaaaaacacagttagaacaatttatggttggaaataaatcaggccaatcattagaatttattaacagtaatgagggaggtgttcaccgcgttaaggtcacattgggtcaaactgttttaggtcaggcagaggctctaactgaagagttagctaacaaaaaggctgcttcaaatatcctgtctaacacatctctattatctaaatactctgttcacaatgaatctattccaattcatccaatcactaaagaagagtctgtgaaaaagaaacctgtagacaacaatattaaaaatgaaactactacaaaagtgtctcaaaaggacaatgaatctcaaacattgaagaatgagacagacacaaaaaatactcaaccaactcaagtttcatttgcaacagaaaaaaatagcttaaacaccaccaacccgcaaccaatgttaactgctgatgcattaaacgaacaaatcatgaaccaattaacttctaagatggcatcaatggttagtcaattcacttctcaatttttacaaaataacaatatttgtctacctactgaacaacctgtaaacaatattcacttttccgatattaatgccacctctgaacaagcagatgtagatttaaaagatcaaaacaagaccactatccaaaaaaatgacacaacaactgaaaacaaaaagacgcaaaccgtggagaaatctacacaatataattcaattaccactaccaatgaaaaagttggagacactccgtcaccaaaaaagttccaaattacttctagcttgaacaacctaaatccaaacgtaccaaaaattgaaaaggcaagatatatcttgacaaattcactagaaaagaagaatgtggtttctactacagcttcaaccactgagactgttaatgacaataaaactactaaaatattaatgaagaatggaattccacctcttccgaaggttgacctttccttaaaagatttggccaaaatatcaccaaagcaacttggttactctgaaacagaaaataaaagacaaattagctcgactactgatgaacagcaacatccaagccataataaggtacaacaatcacaagaagcaaaaaccacaatatccgaagatgttgaaagtagtaacattacaaccttatccgaggaaagtgtaagaaaaattaaaaaaattaaatccactgatccaatcaagttaccattaaaaacttcatgtgataagggtgcaaaggctaaggtttatgaaatttttggtagattcaaaatgtatcctgattacactactatccagttaggtgttaatgacttttattctatttgcagcattagaggtgaagaagactcttttatgggtgaagggcgtggtagcagcaaaaaaattgctgaacaacttgctgcctctgaagcattagaaaatgaaagattgaaagaattagttgaggcccgtaacaaacaggttgaaaaattattaggtgttaaaatagaagatttagaacaatcgagcagtgatattgtggatgaggttgatacatacaaatactttcagccacaggaagacctaagagaacttccagtcttcaacacatgtgataagagttctatgtctagattatatgctattatggggcaatatagattatttccagaatatgaaagtgttcaagaagcctctaacatctttcacagtatatgtaaagtcaaaagcactgctgttatattaagtgaaggtcgtggtactactaagaagatatcgcaacaaattgctgctgagaatgccttggagggtgatgtcttagctgaattactctctgaaatagcactagaagaatataactaatagaacgcttttggttgttattaacgggtatacatataaacatacaaatacatatatatttacgtgtattttcctctggctagagatatgtgattcttcgtctcatcttatttcattttatctacctgagaaacagaggtaacttggaacaagacccaagggaccagaaataaaaaaaaaaaaaacaagccaaaaaaggaatgaaaaacacaatcaactatattcaataatgtatattaaataaaatctataagtttcaatgcattattatatatatatatatatgattataataatatttccgtattaagtgcgtcttgaagatctttttgttttatatctgtatcgagaattggtttctttgagggagatagcttcttgattttaaccttatcatgtttaacaacggaggagactacgactgaactagcatttgatggtcttcttatacaagttttgatccttgatgttccttttcgtggattacaaacacccgtctcggaaacaatgtttgattggaatttctttccaaaaaggttccaattagaaaacatgctatttgagttagtaggggttagagaccgtgatctttctgaattaataatattagataataaggtctttgaacttgtttcatttgagttggaagatggtttaatgaaagttggctgtgtgaccaccacggtgtcatttaaagtggtcttaatcgattcagttattgatttattcccatttgtaataaaagaagaagtcttatccgcataaaaatgataaaagataaatggcttttttgtagtctttttcgaaaagatactatcatgagaatttgacctttgtaatggtggaactttatcaaaacgggagttgaatataggtgtctttggacatctattagacaccatatcatatggtaaaagtaaagtatcttggtctagttcgtcctcatgatcacgattggcgccttcaaaatattcattatcattaatatagtctagttcatcatcggaatatataatattatgagtctgattttggttattttttgtttcttgtataattttcatattttcaaacacagctagggacaatctattatttttcttgaaaaacccatctacttgttcttttctatccatgttgctccctgaaatggtattatttgatatactatgatgcgattcaactgatctcaatcttttctcgggtgattccgtttttaataagggttgacccctgtccatatttaaatgaatgggagaattaggcagggaagacgctatcaattgtagcttcttcggggtggaaccaatcaatacatcggctggtggaaaagggacaggtaataatgagggtgctaccgtgggaatattattagttgttttattcggaagtgagggcttaagttgaatatttcttcttgacagaattctcaaaggcttcaattccaaagaatcgttatagttagaggaatccgatgaagaatctgaaggagatcgtgaagaagatctcttgtatgagtgggaagttatgtcattttttcttgcttgtgccaattcatttaattttaaagtcaaatctttaaattcgaatactaaattttccatgtatgatatatcatcttgcatgctattaaggctgtggacactattcctgttattattatgattttgcttactcttcttgttgaaagaatctttatcttcaagtggataccttttcatttgttgttgtgggtattgtatattattattcttgttagatataatgctattcctaggacctgcatgaatacaatgtttcaagtataaagatcttcttcgtaaagatttcaattggtcataatattgttgttgtttttctttagcacaacgcattgaatcatcggtgatgttgttatatttatttacttgatcttcttgtttttgaatccaacgctccaactgccatatagcatcttctgatcttttcagcagttgatctgtaatgttttctaccatagtttgatccatatctacttcggcaattatactagtcactatgatcacaaccttaattcaaaatgagtaaaaaaacaaaaaaaaaaaaaataagtaaaaaagaatagcaaataacaaatgatacagaagataagcctattttaaattaatccttgtagattttcttcaagaacgtattatattgaaaatgttcaacgctaaataataggcaaaacataataaacagaaacaaaaaaaaaggacaactaataaatttttcttagctgaatgattatctccctgcatcgattttttttgcaatggctttttctttcttcatctcttcaaaagtcaaaatgccaaagtttgtcatgttatgtttatttttttttttatttttctcttttgttcatcaaattttgacattagacggaattctcacggattgaaaattccgttgaacaaagaaaccaaaaaaaaaaagagatgagaaagaaggccttctcccaaaccggagatgtattgccaccacaaggaagactccacggggttacattcccacacagagaaaaagaaaaggtagaaagagagagggccaggtctctttctctctctctgcatgtgtgtgtgtgtatgagaaacggtactaaagactggagttgcaattccgatggataccagccagccaattctcttccccacgcttcaaactggcctgttcttctgtttggctccagcaaactcgccattttagttgtggtggacttgtaattccgctctcttctctggtggtaagtgtcacaatatatgcgatgatagttattctcattatgtgacacttcctaaaaccaaaaaaaaaatgtttgtatacacgcacctttatttactttgttatttatttatttatttacttgctttattatctttgggaatggaaggacagaaatacaatgacattagagtaaatacatcaatagtaaaccaatcgatgagcacatcatctcgtcgtctacttggattcccctcatatgttgaccgttattcactcatttcttgtgatatataaagaggaccatattcctaacccaacacacacatacatacacacaaacacaaacatattctctccttctatctctttttatatactaattaatacatactttcctttttcacttttatttcttacctgatagtgttgacattagtaatataactcaataattaaatacatcaagagaaaacacacacacacacacacatatatatatacatacatacatacatacgtatatatatatatttaaaatgtccatagtctataacaaaactcctttactacgtcaaatatttcctggtaaaaactcaccacaattctttttaaaatatgaatgtttgcaaccaagtggtagctttaaaagtagaggtataggcaacttaatacttcgaaatgcaattaatatacagaaaaaattcaccaatcaaaaaataccacatatatttgctagttcaggtggaaatgcaggttttgcagctgccaccgcctgtcaaagattatctttaccctgtaccgtcgttgtgccaacagcaacaaagaaaagaatggtggaaaaaattaaggccactggtgccaacgttatcatcaacggaagccattggaaggaagctgatacctatttaaagaatcatgtaatgtctaaaatcgataagtcttctattgaacccgtttatgtacatccattcgataatccaaccatatgggagggccattctactatggttgatgagattatagccactttaaaggaacaaaaaattgatatctttaaaaacgttaaaggaatcgtatgcagtgtaggtggtggtggtttatataatggtataatacaaggtttggagaaatataacttggcagataaaataccaattgtgggtgtagagacacacgggtgccacgtctttaacacctcaatgaagttaggcaaacaagtggaattcgacaaaattactagtatcgctacctcattaggaactgctagcatatcaaaacaaacttttgaatatgccaaaaaatatctcacaagatctgttgttgttgatgatgcaagtgtaattgagacttgtttaaaatatgtacatgattttaatatggtagccgaacctgcaatgggtgcctctttgcacatggcttataacgtaaatttattggaggatgcgttgggccacaaattgacgccaagagacattatcttaatcattgcgtgtggtggttcttcgaacaccattcaagatttacaagaaacattgataaaattaaaaaatcaaaaacgggaattatcaacttacaaattggctaattttgataagtgtaatacacaaagtattcttcaacaaatataaacaaacaaacaaacaaacatatatatatatatgtatacatatatatacatatactagtttagttatgcgtttacaataataataataagaatctaataaaaaataaataacaattttttttttattttattttactttattttattttcttgttgctttccgtcctgctccgagcgaagagctgatttatggaaatcaaaatacaccgtgaagatgtatgttccatatatgagtagggattgaaaaaaaaaggatgtatttcttgaattcttatgttgtattgcaagatgaataacattgagaacaagaggagtgggaggaaggaagaagactgatagagaaagagaggccatccaatctatacatattcacacacacacacgcatatatgtatgtgtgtgaagaagttgaactaggaggataaacaacatgtcactacaattattatttaatattagttctaaagtatgttcttactttaatcaagatatctaggttgatataaatgaatgtttgaaggaatgagtgtgtatatatttatagatagttactaacttgaaacatacacaactacaaatatatatatagtttctttctttcttttcttctgttttgttgttagttaattcttgaatcggacctttgtttatgtgagagaaagacccttttacgacacatgtatgataatagttatggtcgaacacacctaaccaaggatacgcggttattcttggagaaagtgtttgcccagaaacagtggttgaccaaggaggaacgacagttaattgccaggaaatgtggacttagtcccttgcaagtaagaatatgggtatgttaattttgaaaattgtttttgctaggtaactacctcttaagtactaaccctaagtagtttataaaattgtgctgctaatttatctaacctatacaaatcatttttcttgaactaaatcgagtataactgaggatacttgaactgacttctcctttcttcttctgtttgacacccagtttcttatttgaactttatttagaccagttgacttagaaagtttttccaaactgctcttagttaaatatggtttttgataatgatcattataccattgttctaaaattgttacgttgtttaacgaaaacctgtgtccacgatatgaatttagtgaggcctctttcttattcatcatatcctgtgtcattatattaaaaatcacagcattttcttcttttgttaattgcttcttcaagtcttctttaggaaaatgttcaattatctgttccattatcctacatatctggtaagttgtccttaaatcttttattctttcaacttcagcaatgttttcacaattatctttaattttacaaagagtcccaattatatcatcaaaactagtgatcaaattttcaggaatatttgaaccataatttggaagattagaacatattctaaacaatctatcattgattttcgtaatactatttttttctttctttatacttggatcatttaatatatccttaattaaaatcttgttcatgctaacaaatagtagtactttttggcagttatgttattgaactgtggaatgatggcaataaaataataacttgttgtataataatgaaacaatactatcttgagatgttaacaaaaataaataaagaaagaaaactgatttgaggttaacaaagttaggaacttgaaagatatcttgactttcttctttacaaaaaagaatataaagaaagattaaagaaaactgattcataaaagatatatttacatttttcttttatatcctcttaactttttctaaaggttcccttttatgtatcaaagtaaccaagatgaattcaaaaagagttatattcagagcaaaagtttcaggagacaaaaacaagaaaaaaataaaatgtaacaagcaatatatttttactggttcatttagcacaacagtgtttaattcaagactgaataaaaataaatcatttcctaataaaaagatattagatatcattaataaacaaaatccaatcttgaaatcaataaaaaaaaagatcaaatctccagaggacattttggaacaaagaacattaaatgccttctttgcctttagaatatattactcccaatttggtcaaggtattaaccagaaaaatttatccacattgttagcaacagaatggaagaaagacctgaatgaacaacagttttggaataatctcacggaacagtataaacaaattaaagatatgtaggtatttgtgttatcaggttactttagtgtgtttagctgttggtttatttgtggtgtttcttctttattcttgatatcttctcttattttttggtttttctctttatctgtttgtttgtttgtcgtgttgtgctgtgttttgttctgtcatgttttctttctcctctatcctcccttcctttctatgtgtttgttttcgtataatccattttagcattactaatctcgtcctttctcctgctttttgatatcgtcccctctcatctctctctctctccctcataataggtatcctttatccctgttaattaaacatgttcttgtatttactcttttctgtaaatgaaacatttcttaaaaaaaaatttccacattcagatataacagatgtaattcacttgattacttctttctttggctatattaacatactcttatcttggctatggctgcaccaacatatttttctacccctatacagattcttatgcttactattgtttatatttgcattctgtaatagcttgtttttttcataatatgtatcagatttcttttgtagtagtagtatttttatattatgttctgttaaatctctaagatagtcttttattaatagtaatattaactgattttgaattacaagcttatttgttaaccgccgaagttataattgagatcagaatcgatttctcccatcttttttcctttgtttttcttttccttttttttgtgacacacaaagaaaattataacaccatgacatattctgtcacattaacccaaaagagaaatcgttcgatgtgatacataaatgataaacatgtatgcttgagttatgacatctccaaatctatctcatcttttttacaacaatatcaaagtaatatgagataaaacaaagatattatgcagctcttagttaattacgacctttctttttattcttttttttttggcaatagagcaaaaccacatatttttttacttttttccaacgtacaatgaagttttttttgtattcttaaaggaatactaaaaatattagatagaacaacggcaactcaagcacaaagtaacagtgtaatactacttgttaaaataatgatgtctgttagaacaaaaaattgactacactcatatgcacttagttagcattactaagtaagatagcaaattgaataacattatgaactttctaccaaaaaaaaaaaaatgttgaaatataatataattgaaaattttcaattgttgtattatctttatctaactctacatatattgcattgagaatgttgaaattaaacctttattttgtacatattttatctatgcttctttactatcctttgtttttttttctttaatcaaagagaatagaagatttcatagttctcattttgcacgaaattatctaatgtcaaagtttctgtgtttaataattttgagcagccattttctttgtttaccattattttttacacacgaccttttaacagaacgtatcactgttgacggaaaagaataatatttttctaaacaagaggaatttgtgttcaatgtaaaaaaaaaataaaaaaaaaagaaaaagaaaaaaaaaagtgcaagccagaacaagtgaaaaaatgcttgttcagttttcattttgcctgtctatttcttgatccaagaagaatattaccaaccttacacaccaaacagtaataagcatcactttcgcaagagacattatcaacactagtaaatttcaaaaataacatccactcgtatttgtgggaatatatacataattcatccataattaaacaacaaaaaaaaaaagaaaagaaaagaagtaaaaagacaaagcagagaaactagagagaaaaatttttgctatcttcttttttttttttctttttcctttgaaacttctcgttcatatagtttttttggaaatcatgcattttatacaaaccaaaaaaaaaagaaaagaataatacaacaaagcaaataaaaacatcgttcctcgagaaaaaaaaaagaagaagaaaaaaaacatgaatgaataaaaaaacaatagaactgtttaagaaaacctcaccttattagtaaaagaaactcaataaatttatattgtcttcaacacatctacgctcctgacacatttatcttgaaggaaaatactaacaataagaatttcgtatcttttgtagttgttcagtttcactaaacgaattcaatattgaacaaagatggaacgaacaaaaaaggtttattagtattgcataataaacaaacattttactttcaaggaaaatgaagaatttttatggtgtcttaaaagtaaatacatctttgttttcttttattttctaaataaaattatattattaatttattctaaaatatatcctactatccttttatggttataattaaacgcaagcttcatctgatatttttggggagaacaataatcgtaccatatttatgtctcctttttgatatttattttcgttaattactattataattatttattctctcttttagtttaaatcttatctttttttttacccgcgtttcctttgatctttgaattaataagatccttaaatattaaatatataaagtcaattattttgaacttctttttgtatttgtcattacttgtttcctctcgcttattccaatgcgtttttttattgctaatgcaacaaaataataggataaccgtgcacaccctgcaatatctcatttaatattaacgatggtctccttaagaaatactgctgttttagctgctgccactttagctacttctaacgctgttcagacccttgctgctgatgatgaaaaggctttaatgttagaattatctgtctacgttagagatattgctaacaacatgcaacaatacttatctttcagacaacaacatccaaatgaaccatacccagctgttttaaacactgtcgttttacaagctgctggttcctctgatgacagttggactactgctttaactggtattgctccagctatggtcgaaagaatgttgaccggtgtcccatggtactcctctagaatttacccagctttaacctccaagttcgctcaagctggtgttgttgtagaaggtattgatgctagtgctgttgctactaccactgcttcttccacctcttccgttgctacttctaccgctgcttctacttcttcttccaaggctgcctcttcttcctctaaggctgcttcttcttcttccaaggctgcctcttcctctaaggctacctcttcatcagctgccaccactacctctgcttctaaggccacctcatctgcttccaatgcccaagctatctcacaaattggtgacggtcaaatccaagctactcacactgttagccaacacactaacggtggtgctaaagttgttgcaggcttaggtgctggtgccttagctgctgctgctttattaatctaatgatgctataaatacttgttgaataagataagatatatttttgttttcattagagtaaagtaatttttaatatattatatatatgttttctttgatcttttaattaatgttggagtggaggagtgttgttctattaatgtcgttatcaattcatctttacttcaggttatttaagaatcctatgtgtttatacaaaacaatttagttctaattccttttataaattcatatattagtttaaatatttgatatcccaatagataattaattattccttaaatcttccgaactgaagcgcattatgtgttttgttttaacacattctatagtaaaaaaaggtgaatttaattcggtaagcaaggaaagatcttctctattttgccactatagctcactgggtgtattagctaagacatctatatatggtgttgaaattcaaaatatacacaatcttcctataattcaaagaatgaactaaatgccgaagaatgtatttagctgttgttattcttgtttaagtttcatgttgaatgtcaccaaaggaagatcaaacaaaaagaaaccaaatacaaaaaacatatctcatatgttaacattcagtcactattttttataaattcctagtttaactactggacaagtaaatagaagcaaatttcgacttacaatgaaaaaaagtgttgaggcttaaaaatagctatatatatagaatacaaggctaaatatcttgttcttgcctaattaaacgataccaagttagaatttccacagttttaaataaaattataactacaaggttttagaaaaacagatgttcattattaataaatatcgttacacatttataaaaatacttatagagatctataatatacatttatccaccaatattaataaaatataaaaataaaccacatcaaataattcatataacggcggtctgtattttcattatatcaataaaatacctgctgctaataagtaagcacccaccccaacaaaatttttgacagcctcattcttactgtattgtgaaatatttgcagttgagcccggaatatttgttgcagcattatcttcttgttgatataaagatactgctggctttgttgtaacagtagtacctgcaacaaatgggtaattaactgatgtaaatgatacttcaactgaaagagatggtgtagtctgagtgacaccagtaatataattgttttcatcctttcttctcatgcattcttcatcacacacagtttcagttgcagtggttgtatcgtaaacagtaaaagaagtgaccacttgagcagctgaagcttccttctttttagccttgcaaataatgtcacaaacggtttcagtaacaacagcaccattaaccttagttgttacatacgtacgttcagccttagaagcgtcactgaacttagatttacaaactgtatcacaaatagttttagtaaccacactagcagaagtttgataaacatctactatagaggtagatttaggagggcagctagtaataattgttgtgttggtataatgtgaggttagcacattccactgagttgtaacattaccaggaacgacagttggaatgtcggaggagactgggtactttgacttagaagaggaagaatgaactgggaaaattggtgcaattgtaccgtttctagttgaagatacaaggttcatagaagaaactgaatcaacagaagacatcatgctgctagaaaccatagaagaaacgaccgataatggagaagtggttgtagcagtcgacatataaatattcttggaagtatcttgtggtacaataacatgcgaagtagaagcagtatttgtagaaataacagaagcagtgtttgcagaagagtcggtactgacggaagaaataacagaagcactagagcttatctcagaggtaaaagcagcacttgtagcatcatcagtagtggaggaaacaacagaaggagtgaagtttataccagaggtagaagtggcatctgtagtagtagaagaagcaattgaagaaggagagtttatattggaggaagaaatggtgtttacagtattatcagtagtagaggaaacagcaaaagaagtagagcttatatcagaggtaaaagtggtgtctcttggataagcagtagtggaagaaacaaccaacatggttgaagaagggataatagaagaagtagagtttacttttaaggtagaagtgttaggaatttctattaagttaataccttcaacagcaataccctccctgttcaatctttgtcttaaaacaggtaaaattctactagaataccaagggactccagttaacatcatttgaactgtggaaggattaatgccggttaattcagtggtccagctatcatctttatcatcaaacatggcatctactacgacattgttcatctgactaggatatggttcatctggatgtgattgacggaaatccaaatattgatccatattatttaagatatctctgacataaacagctaattcgatcatttgaactctttctcttgtaacaggcattgtagttgttatgcgttgtgataaaacactggaagatgatggagaaaaatcggtaacaatcgaagatgttaccaaggtactagatggtgaagataacaatgaagcatcagatgaagaagtatgtgttaaaacagaagaacttggcaagatagttgagctagttgaaacagaatcacttgatgaagcggaggttgctaaagtagctgaaacagttgaagtttgtgaagaaaaaaagcttgaagatgggatagaagatgcaaattctgtagaactagaagaaaccttggaaaaagaagaagcaaatgcaattgttgatgaaatactactagtagtgaacccagagctagaagtaagactggtgacaatagaagaagaagaggtgggcaagctacttgaagaagtagttgttgaagttggggtaacagatgaagatgtggaagaagaagtaggcaccctacttgaagaggttgttgaggtagttgttgaagtagaagaggaagaagatgaagaagaggttgttgaggttgtagttgaagtggaagtaacagaagaagaagaagaggtagacatactactggaagaagtagtagtagaggaagaagaggaagaagaatatgtaggcatgctactggaagaagtagtagccaaagtagaagaggtaaccatgctactggaagaagtagttgctgaagtagaagtggaagaagaggaagagaaagatgcagacatactattggaagaagtagttgttgaagtagaagtggaagaagaagaagaagaggtaggcatgctacttgaagaggtggttgaggtagttgttgaagatggtgtaacagacgaagtagaggatgtagttgatgtactagtcttaacatcacaatcactacagttaataccttcgacaacaataccagcagaagataaatatgcatccaaggcaggcaaaattctagtggaataccaagggacaccagttaacatcatttgaacagttgatggatcaatacctgttagttcactagtccaactatcgcctgaaccaccaaacatagccctcatgacaactccgttcatttgacttggataaggttgattaggatgtgatgaacggaaactcaaatactgtcccatattttttaggatatctctcacgtaaacagacaattcaatcatttgaactttttcatctgtgatactcattgtagttactgcattggcaccagacataattgcggttgccgcaaccaatgatttcccaactttaaccattttgcagttgcttttatctttttgtttttcttttgagagagattgcttgggtgaagaagagttacctttttgtgaagtctagctagaccacaaaataaagttgaaaacagtctaatgtccaaggaccaggagatttttgttaaagattctgatatgtaatattccaagcattaggttatatatgtgttaaattgcaatggttggtacgttgctatgtcagtcactatcacatgatttttattaaacgatattattgacaaaaaagacatcaaattagaattatttggtgttttctgagaatttgttcatataaaaactactgacatattttgcaatttttacgaataatactttgaaaaattagtttctattattatttgattgaactacaagatttgatcttgatcagtattgtaaaaattgtcacataattaatcaaatgtaacctatggagagaaagcttattagaaacaaaagctttttttttatttatcagcttcggtaatatcaaataacaaaaaaaaatggagcatagatatctaaaaagggttcagaatttttaatataaacacgacaagtgcattagttaacatacgatatgtaaacaaactaccacaatctttgaaatctttttgttagttattattattcttttagttctaaatatacgtgaacaatcaaaaagtaaagaacgtaaacataaaaaaaaagaaaagaaaagaaaaaataccaattctatatgcgtctcatatgcaattatcacattttaagattaaaattgtaccagttcaaaaagagatcctggagaactgttttctgtctagaagtatagaattagtcaaagtaattagtttaatacatcagcttcggtgaacttttttattctatgtatttaattaataatccgatttaacgaggagaaataatcaacaatttattgttaaaatagtatatttccaacaataacaatgatcatttattttttatgctcagttttgtatatttcactaacatacgaaattttagttaattttctactgctaaacggttttttgttcgactattagtgtttactttgatttttgtttttctttgcttataattaatctgaaaatagaaagttacgaattgtttcgtttaaaaaaaaaaaataatgataataattttgaaaaaaattgtgcccaatttatttttacaaaagaaaaggctctatgttaatttatacgagaataaaaaaagaaattgcaatagttcaaaacttggttttgtattggagaacattgtccaacaaaagagcttcgtagtctcttgtctcaagagttcacacgatcatatattactgtaaatgatggtaaacataatggttaagaccttacactatacaaatataatagataacctggattggaaaattgttctattatatatgaaaacgttagaatatgttacatgactttctcaggtaggagacccaaccacattatattgtacaattttgaaattacgtgatgatagaagtttgtgtcatagcataggtgtattgcttaattttctttggattcatattgtttcatatgagagctgtttttaagtgagaacacataaactatttcatcaatgttgaaaagttattcctttgaattaatgctgcatcatggatgtcaacatatggtttctatatgataaactaaaccgttgttccgattagaggttccactgaatttgaattaaaaaaaaaagaagaagaaaagacagaaaaaacaaaaaaaggtgactaacatttcagaatatatatttccagatcttttgtgataagatgaaatcctactgatctagtccgcagtgaacttggtatttaaaatgtctatggaatttttttatatataataagtcgatataaatttctctggtttacgttgtaaacatatgtgttataggtagtgttacataaatggctatgagattaatgagatggtgcagttggtatttttagtgcgtgtggttcttaaaacaaagcctcaatcacaaagtatgaattgtttgtcaaagacataattattcaaaattgtctatactttactttaccttcaataaattgaagatgtgaaagatcttaattttacagtaattagataaacctttcaatattccttttgtatctttttgtaatgtagtaccccacatagcagagtttttattttcatcaaacaaacatctgtttagaaatgtgcacgaaaatgtaaggaacaatcctaaaaaaatatttcttaactatcaaaaattttcagtgaacagtattatgtttctattctgttgtataagaacggaccaatcaccattattatgaaacaaaattttctagatattgttatcgataaaatgaacacggatgtattagtcttagaaagttttaaaaacagttagtagcgattcttatactataaagacctataatcaacttgctttctttatttatcgtctatataagaaagcttgtgagaaatttacaattaactctaacaagtcacaaaagcaagataacttcttcttgagtgagctcctatgatacaaagattacttgcgatcacagataatcttgaagattgattttgttgtatgcaattgttttctaagtgtgactaacttattgttattttaccggttgtacttctttgtaagtttcagcataaggcttcctaacaatagattctgctcgataaagaagtaaagggaaattattggttccaaaaagaagaaaaactgttaataaggaataatgctcaaaattttagcataaatcaatgtatatccaaacgttattgccctttagttttatatcttctattgataataaatatctatatccataaataaaataatttattcgacaatggtagtattttcaacaaacttatagtagtaacaaaactgtcgctcaaagaattttttgttttagaaaagtcatttattacaaagtcacatactccatctgaaggtttgctcatggttaatttactcattatatatgttgatgtgtgaattatactcgaagacaaatataatagttaaaaaattgttaagacaattatctttttgatatgtaaattaattgaagaatgttattgatcttaattataacaattaatatgaaatattgtgagatagtattaaattgttttcattctttaagaaaaaatagtttttagatttgtacataataaagataagtaatattttttatgaaatattcaactattcaaagatcaattatagatatataaaaaacagcatctataattataaaaaaagttatctttcaagacaatacagttgcccttatggatcaattatattagtaaagataataaaaatatatatgactatgtatatcaaactaaaagaagtgttatttgcaagagtagtatttaccttataattaatgaaatacacattgcattttgataatagtatatatattatagaaaacttaatggacattaattgaacaagttcagtaaaataacctatttcaaataacaagacatgtaaaaaaagttggtcaaccaaagagtatttcacaatactgtcttagattgtatttaaagtatcgactagtatatgtatgattgaagtttgaaaattatagtgttaattagtttataaaatttgatatttctaatataaattaagttatgaattattcatgcagaataataccaatagtaatacataagtaaatttaccatattattgtatctattttatgagaactttcagacaaagagaaagatttatgttagcttcattttgtagtttctttcttttctgctctcactaatctttagtgatatgatctaatattatctttattttattacatgaacttcaaataaagagataagagataagttttaggaaaatagaataaatatagcaaaatataataatgtagggtatatgtgaatattatggtatatcgtttacatcaatacaattgttgttttaactattttcaaaaaatgacaaacagtatcaactcacatcgtagagaatagtttgtttataaactcactgtgttgaatattccgcttcattttagcagtcagaagaacagatgaattaacgtaaaaatatttaacatcggtaggtagtctttagtattatcataatatttactatcactatgtgtgtacacttaagtttgaatacatggtatttgttattgaaatatttgaatagttttattaatcttactttcttaacacctttattaatgagtaagtatacctctatagagtaatgaaaaatagatgatgatgatagctgtgttcataataaatatattatacaatatttgatttggtataaatattaaaatatccccattatttcatcaggatgaaataacaataaaaatgatactaacaaatattatattgtgtatatcctaaaatcattaaaattttctatcatatacctaacatctatccaactctatgtaatagcgaaacacataaataataattattttaacaatatcttggatgtttatgtgattatagaatattaatattgaatgactttcctttttcaaatagggaacacgtaaaaatattataacaaatttgcatttctacaaacgttagtctataggtatggtattttttgtcgttttaatgtaaaacattaaattataatgataccaaattaatccttgaggaaaacagagtcagttactcatttctttagtgtggacttgattgctggtcgtattatttattctgctacaatttttccttcaatcttgttcaatattcaaagaccttagggtacaatctctctccattttgttttcatatttttcagaaaataaaaaaatagaatcaaacaaataatagatagatagaaaagttgttgaacaaggagggttatacagcgaaatatataaaggtacagacgattaaaatactattctctatatcaaatctacgtattctttatcgccattacaatagtcatcggaaattatattatagattgcattcatctgtaataaggctggagtaagcaagaataaatatttatgtgggttaagaaaatcatcatgatatgtcgaatttaaacaaataatctagcatgccaagaaaatgaatgaataataatatccaataatatgacaattcctggtcaatgttctgaaaaattttaaagaataaaatagaataagagtaaaaaagacttcatgctattatgtaggtattagatatccatagaatataaagtgagaaagtagcattgtccaatatatatgccaggatttctttttaaacatatgtgtatatctcaaagttcataatatatgtagcattgtaaaggtactttaaagtcaatttatgaagtaacttatagattttgttgaagcaggattttttgaggttgaaaatatagataactcatactttagcaaataataatcaattataaatactgaataatcgttctttacacatcattaaacatgagcaaggctaattgattaatttttttgatatagtcgtaaagaattaatgaatatcaacatatataaagccaaaagttttttcacatcatattttttctctatgcatactattaactatacaataattatggttgaaaatttacttaacatattaaatacatttagcgatatattctagcagtttttgttgagaatgagcgcctgtagtcattggatacatagtaaacattctcaatattatattaaacagacttagtacacaaaattataataaagttcttttctttctttctctatatacaacatagaaataataatatacaaagattataaataagataaaaataatgtatgatgaaatccttggctttatatatgttaacattaagccattttcctctacaaacggtaagatatttaataaacaaactcaacaacttttgatgacctctcaacgattattactcaacaatttatcgtttagtgtctgctaaaatcttattgttctatctatttcattatagaacattctatttcaatagttttagatattgaaccaattatctgaaaataattgtgctgttgaaatatgattagaggtatgtttgataatctaaattcatcgtactaagtgattaaaagttatgaaaatttatagtaaagaagattcaaagataaaatgagtatactgtataatattgtatcttgtatattagttatgtagaaagaaaaagaccaagcaatgaaataataatctacagtaccactgatatcctactataaatagctgtgaacttataataccaccaatatcctattgtaagttatattatcttattatattaattcaaaatgaacactgatagaatttgtggttccgagaccttaattcaacatgtgcagttatgaaatacagaaaagtaatcaaaataaaaaatcatttgaagaaatcttaaaatttttcagatagtaaatgagcaatagttatgacaggagatgttggcacaaagcatcagtatcaaaaatttttttcaaaattcattattgaattaattcgttcaaattgtaaaagcacagattagatttttgctgatattatgagttgtaagcttgtctatattagaatgttagtgtttctccaactctgatatttatttcttggttgttttattctatataactaatttagaagacacaatataccatataacctattttatatttgagtttattaactataaaaatttataatctttttagccagttagcatgataaattcagattatcaaaaatgtatataatcatattttaacattactccacacaatatagtaaaaaacatgtattattactacggacacaccacaaattattaggtcgttaattttttttaataaattgattatataatggtcgttcctgttgagaattagcacctgtagttattagatgtagagtatatatcctcaatattataattatagagatattgtatacaaaataatagtagtattacttgatcttccattatatgtatgatgtataaatgatgatgattaaaagatacacaaagaaagaatcataatatgaaaaaattgttggttttgtgtattttcatatctgacacatctaatttacgtacggcttttgtttgttgatatgtttaatttacatttactaataagcaaatactacattctcctcattttgttatcaattaatatttactaaaatctacttgttctgtctctctattttagaacgttcgatttcagtagtttctgttgtgaatattgatatatattttaaataaaacacggtgtagatataataagaatatttatactgataattaacttcgttactttctcttaataatcaaaggcttcttgaataagctgattagtaatttgacaccaatattcattcagagttttggttgttgttagtctttcagttgggtattgagtagtatccatagactacatgttgacgcaaggcttcggaatcaaacattctagtagagttcatttaagactaatataataagataaggtaacttacaataggatattggtggtattattagttattccttggtcctttcctttctatataagtaatatacaaaatacaatattatacagtatactcattttatctttgaatcttctttactataaattttcataacttttaatcacttagtacgatgaatttagattatcaaacatacctctaatcatatttcaacactacatattttaagtgttgagaatgagcgcctttattcattggatatatagtaaacattctcaatattatattaaacagatttagtatacaaaattataataaagttcttcactttctttctctatatacaacatagaaataataatatacaaagattgtaaataagataaaaataatgtatgatgaaatccttggctttatatatgttaacattaagccattttcctctacgaacagtaagatatttaataaacaaactcaacaacttttggtgacctctcaacaattattactcaacaatttatcgtttagtgtctgctaaaatcttattgttctatctattttatcatagaacattctatttcaacattaagatttccagttagagcttcttgcaatttaatataatgatttacatttatgtcgttattaagtagagttaattttatttatttaatcgtattaacttatttgaaatttcaaaaatataaaaaagaaaattgtcatacattaggaaaagctcaaattgcatggcttctaattatatctactgcaacagaatgttttataataaaataaatagaccaaattacaccttagcacattgtaaatgtttaaatactaaatatctaatgttttcaaataattgcacttttatggaattattttgtttttgttctctacaaaagagagttaacgaaaattgacatatcatattctttatttcatttacctctcttctatctattattatctctatattaggtatataaagaagttagaagaactttactttaatttttatactattacctacatattaatcgtaactgaaaatacacccaatcaaacgactacataaatatagtaactttcaacataatactattctaataactcccctttttttacaaaaaggattttaaaaaatactaaaaattgatttattttgtaatttaattttattggtttttgattaaaaatccaaaatccaaaaatcttgtttttgtcttttctgaactgtatctatcacttataaataactcttcttttttcatgtttactaggaaagatttcaggattaatgttaaaataaccaaaaatcattctcaaaaaaacaataaacttttaaaaacttttttacctctttttctatccccctatcttcttcagtacaaaacaagctttaataaaaacataactttatctgattttaatgaaaaataaaataatgttcgcaacatattcattagtaattctaaatcatattgataaattaataatagaaaatagattatgaaggaatatgtgataactctagagttatgtgtttctgataacagttattaatatttgaacatttcttaacaaaatgttcattaacccaatgtattatacctggaaagaaaacatgaaatttgtaagtaatgtaagcataactctccgatacatagtattcatttttcaaaaaaatgcaaatattttttaggcacaaaagcagaaatgtcacggaactttctgttatatattgaggaaagatatgatagaggactgatatgattatttctacaattttacaatttcattatttcatgtaaataatatctttgtgcaggtttcaataatttgtccataaaattgattatcctctgcgctactttttcctctttcaaaaatttgtcaataggggacttgtctgatccactaaattctttttcatttttatgaacataatcatgtaattgatgtaaatccattaaccttagataatctgaattctttacatttggatcctttgggacttgtaacacggaattatttgtatgtaaatgcagttcttttaattgttcttccatataccccctaactttaacattagtgaaaatagaaaaaaatattaagcccagtcaaatcaataaatcttgcatcgatattgttattactattacctttagtacgcactacgatagaacttgacacatcaataagatacctaccatcaccttctcttggatcttgcgaaataacactttgattaaaatattgtgccaaataatgtaaatgcttgataggtaattgcaaatcaaaatcttcatcctataaaaaagtttcactgttgaacatatatctatagagtataccatatgacaactaagatatgataccattagatagagtaaatttttgaaaagctcaagtcattagattcaatctatctgcatattcttgtttatcgaaaaggaaactaccaacgttgaaaacccaactatcactatgatacctaatcctgtaataattctgaataccaccactctcttgaaaatattgtttttactgcatgtattgtatttcctgcttgtaacaatagttgtattaaaaaaaattctataccctttttaaaaacaagacaaaaaccggagaacaatccctttatttcaaaaacaatacaaaattatgcagaaaataatgggaaaaaaaacttttataaaaaaaattaaagtttacctattcttttaaaaagtccaaccactaattattccgcgcaaaattgaatgatgagcttcccttttccgaaattattgtatgtgtactgaaagaaaaatttacaatagataagatgagaaagaaaaaatataaaaattagaatcctcaaagaagaagaaataagaacaatagatttaaaatttccagttatgaaattttttttattccagcaaaaattttcgttcttaaattttatcaaatctcacaaaactttttagggagtagtgccatatcatgggtcacctgttttatctaccgttccttttttttttcttgaaaaaaacaagtatttcttagtgtatttttaatattttcttaaggtcacatttttaagataaaaattctttattttttgctatttaattacaattatatgctttgaactttaagtattagtaatatgttagagagtattcaaacaaaaattgacaaataattatctttttgtacggctaagaatagtatttttatttttcttttacacagtgtgctcattgtatgtttcctgttcttctccaattgtaacatattataattctacgaatttattaaactattgttttgttatatcttctaattaagtccatcttatcctcaggaacatttaaacgaataattcctaaaaggcttaacaaatgaaaaaaatcaaaagataagaaaaatagaaaaaaagaataggacaaaagattaggaaaaaaggaaaaaagaaaaaaatttggtcattatttacgcctccactatactccttcctaaatacaaaacaaatgcatttaatgtgcagggaaatttagaaaaaaaacttaacaatagaatttttccagatctcggttcaaataaagtattgacgtaacaatagctatcaaagacaatatatgcaagtattctggactattgttcattatttccaccctagaagtcggaatgctgtgaaaaattccactccctattttcttagttttggtaaaaaaaaaatacccttcttccaatgtacaaaaaaaaaaagaaatggctgcaaagacctatcaactatgacatatctaaagtatgaaatgcaaaatttaatcagaagaaatatgctagcaatactcatacaaacccaataaattatagagaaacaagagattgttccaaatactcaaatataaggatactgtttgttgctaaaatagccaattttcaacaagcagtgtgctatatttactttgtgctatttaatagaatatatatatatatattacaaattaacacttgtatttattgattaacatgaatatattcccaactgtagtttataattcttataaagttaaccgcgtaaattcctctggctgaataatattagtatacatgttcttagcgtcggtgatcatacaatatgttattattgtgtattattattatattgatatgtagtgtaattttccctcaatctcttgattgggaattaataattatataaatatacaagaaacataaagatacgatgtatatatattattcatccagattggaaaattaataagtaaagttgtctacttatatatgtttaccttttggcaatttttcataatatattaatttattttgattttgtttgatcttatctccataacgttgaatgtgcaaaacaaacatttttcttctttgatatatttacatgttactcaaatcggtaatatatcaatccagcataaataattaaactaaaactccttttttctctcttttgtacatagcatagaaataattttatatagaaagtatgcataacgtgaaaaatatgacattaagaaattcttagttttaatatacgtaaatattttcttttctatctggcatttattaaaatcccattgttctacttatttcattctagaacaacttattttaataatttcactactccagagaaaaattcatttcttatgtatttgtgaaataaattagcagatagacaactaatttgtgataaacacttaaacattgaaatatctaagtatgcttgttttttattttgtttcaattataatatatggtgagaagatatactcaaaaagtatatatctgcaattttttgaaaatggcaactaaattctacaaatgaagtgcatctatcaactttcacattttgtaatacttagtagtagaaaaaatgtcacaccgttttatttcagcgaaaaaacaaaaaaaaaaacttatgatatttctgtgaaccctaccttgtttttgttccgtggaataaacgtttaccaaattttttacttgagaaaatctacaaccctacaaaaagaaaaacaatagcatatgcagatctttttataccgccaaaagaccattctgaaatgatcaaaatgtattatgcataatatatacccctacatattcaaaaaaaaaatctggatcttgctggttactctggtttgattttttggttttatcattgatgattatttgccatacatacttataaaacaaatatatataaatatattcatgtctgcatttgtacagtttgcacattgatctttatgtttgttcttttgagttttactttctcctaatttttttttcctgattctcgttcttgtgcgtttaccccagaaaaatcttcaaaaaaaaaatcaacgaaaaatattaatcggataagataaacaaaaaaaaacaaagtgaggtaaaacaaaaattaactacttctcatctttgttatcattagaatgtagatattaattttatggtcactattagagctacttgtgaccaaagtaagtgctgctactacaactatttcaacaccaacaaccttgtctggtgatcaaacgttttctgatgatatcgtaattgaatcaggggctactcttgcattaatatctggttcatcatattccttcaatagtaatattaatgttaaaggttctttaaacattgttggagattcaacaaacgggttaactagtctacaatttagttctactactacaattacaaacagtggtcacatcaacatcgaaaatattaaatcaacgggttctgccagtgattttgttattgcacctgcaagtattgataattctggtacatttactatttcacaattaaacgctgctgctactgtaccaggtaccaatttcactttagctacaactggttctttcattaatacaagtactattggctatgatacagatggtgaaggcggtaccacaaatgggttcctttaccttggtactataactaatagtggtgttatcaagtctggtggattttcttcattaacagctgatggatatcaatggtacgttagtagatacgatatgaaaggtatcatcttcaataatcctattgaaggtaaaggtgtagttactggtaatgctggagctacaattcttcttaacacagatattctaggaggacaaacttttagtatcaacaaggctatgtatttaattaatccaaaaattgtaccaagttcacttaaaattgtaaattttgtctattctgcaatagtattcttaggtatagattttcaacaatggattaatgaaaattttggtgcagtgaaaggcaccatgcaaattaattatggggtagatggccaccagtactggcttaattcaagttgtccatatggctatgtaacaaaccaaatatcttttagtgttgtgccatctgatcctaaatatcaacttgatggtaccttcgtattaattactcaacaattgagcggtgactaatgtacatggttatctgaaccagttattaagacaacaacagttaccactgtagattctattactaaagctagcactatttcaactttaacaatatctacgactaaccagtacttctatactgtgcctgaattcatttatcaagttgctgtacctccactgtctaccacctacactactataactgcatcgatcgccactcctaatacatcgacatataccacaactgttaccgacacagaaggatctgtcaccgaagaaattgtagttgttgtccaaacaccaccattatctacatcctacacaactataacatatcctgttactgccccaacctcatttacattcacagcaactgttaccgatacagctggatctaaaactgaaaaagttgttgttattgttcttaccccacctccatccacttcctacaccactattactagtcgattcgcatttccaaaaacatctacctataccaccacacttgttgacaaagatgattcttcatctccagaagttgttgtagttattatcatccggcctccattcactatctacacctctattacttcagatatcgaggaaccaactagtaccacctacactaccacggttcttgatattcaaggctctccatctccaggagttgttgtggtttatatcaacctatctcgatctacctcttacaccatttctactgcagatgttatagaaccaaccacatctacttacaccaccacaatcacagatagcaacggatctttaactagtgaggttgttattcttgtgattacaccaacgccatctactacttacactactactaccgcagatgttgcagaactaacgaccactacatacactactacatatattgatggtaacgcttcttcaactgctgagattgttattgtagtaatcactccattgtcacccaccatttacacaactactaccgcagaggtcacaaaactaactacaaccacatacaccaccacggttactgataataacggctcttcattttcaaaggttgttgttgttgtggttactccatctccatctactatctacactacaactacaggtctagtttctaccccaacaacatctacttacactaccaacgtcattgacaacaacggttcttcctctactgaagttgttgtagttatcttcacaccacatccatctggctctgtcatctcaaccactactactggtacagtcactgctctaaccacaaccacctacactactactgttactgacagcaacggctcttcatatccagaggttgttgtagtagtgatcacccatctccatttaatagctttataacatcatcaatttctgtaccatctcctctctatggaaactccacaatttctggtgaaaagatcgaatctactttgtgtggcactctagttgttttgactacggttgttaatggagttactatgactacaacttattgtccagaaccatctgcaacttctgaaacaagtatgactgctatcattggacatagttctattgaatctgtttatactgattcaaggaaccaacaagaagagactaactcatttactactgctacaaatgtgactccggctgcttctattacttctgccaccactggtccagcatttacaaacagtgaaaatcaactgacatctaagaactccagagcatctacgacgactgttattggatccacaaagggtaaagcagacgttacttcagaaactggtactgctgtcagtactgtcgaatctagaagaccagaaacatcaccaaccacaatggtgtcacaagtttcccaatatattcctgagcaattatcctcatcatcgactggtgttacagtacctcatgaaggtgtaccttctcttgtgtcatatgaaggtaagggtggtactatgtacgtgaaatggagtattgcccattgcattggtttattattattcatggtaatttaaattgattaaagacataaaattttaaaataaagaattctaaataatttagtaattaaatatttctatataagcatatataatattctaatattttttatattgtgtatttttattatttacttggtttccaaatatcttgtacaacacaaatagatttactcattcctaataaaccgataatatcttctcccaattttaagtaatttaaattattcaatacaattatacaatctaatagttgctatatagacattttaatacatatatatttttgctacatgttttggcaatttttaataaagagagtgtgattaggaaatttacttctgtataaatcaattgataatagtttaaacgatataagatccttaaaccctttctagttaagaaaaattgtaattatgaagatttaatgttagttcaattcaaaaatcataataaaaggtttaacatatatcttaaaaacagttgcaatctttctttacctgcatttaccgaaaagttaactagataagtgatcattaaatgcgaaacaagagtgtcataaatctttttctttctttattccctaattatttcctctctttcccgtatatatacgtacacacaggtatgaaaataaataatatatatatgctaatttgataacactattgtcccttaagtcaattaagtatatatatatatatatatgtatgtacatttatataaatatgctaactcttattattttcctttttgactaacggttccacttctactacttctcttttagtaataaaatattcgatcctaaatgaaataaggtattcaagaactattattctcacatgaatagtaaaaagataccataaaattactctaacaattttcaaagaatagaagtttctttgattaacacaaaaagaggtgcaagaaaatgaggtgccaagatatttttcaaatactcataattgcacactgatgatatatcatacctactatacatgttaagaatattatacacaaaaatgtagatatacagcatacggtaacagctatgctttattgatcagctattctatcgtatcttttcctgtattttattgggtacagagcttgcaagattttacaagatataggagaatttcccctctacacttgaaaaatatcgtaataataatcatcctaagatttcaataatgtgggaactttctttttaaataaggaacatgtaacaatattataacatatccatatttttgcaaatgttaattcatagatatattatgtcttgttattttaatgttataatggaattaaactcttattattttttttattgaatttcaatatcttctcatgactcttggttacaattagagatccatacacagtattaaacatccagctataataatatcagattaactcttaaagagaataaatttcctgaatattaaattgatagattttcatgttaatactccactacaatttctttttcaatattgttcaatgtttaaggattgagataaaatttctctctattatattattttttcaaacattaaaataaaatcatctgaataaaagacacaacagaaattattgaacagggaaagtaatacagtagaatgaaataatggtgtaatcaaaatattgttcattatatcaaatcaatttgtcttttatcatcattaccataagcattgaaaatcaaacataaatcaaatacatctataataaaattggaattagtaaggataaatatccagtaagatataagtaaaaagatgatatagtaaatttgtttatggatatagcataattgtatctatgtttataacagttatcatgatgtgctaatttcaaaaaagtattgcatgcgatcatgaattattataacagtatcattcgatggataatgaagtgatatagaagatataattatatttttcatattgaaaatattagtaagggatagtgttcatgtgttattggagaattcttaaatagtcatatttattatgaaagtagtagtataacagtaaatgaaagtggtatttaataaatagtttccctagttacaatatatgtatggagtaagttcttttgagaatattctctatagctacttatgaatgattattaagtatacagtggtgtaactataccatcttaaatagtggtttagcaatgttcaaagttataccatatagtaagcatatcgtaactgtttatttatggttatatggatctgtattttatatggttgtcgatgagtgtggctattattgttgttaatttttttttcgaactattttttcaaattttgaaacaagaaaaattgacaattgaaatctgaatgaaaagagattggtggataatgaaaagataatgataactgatgctaagagtaattaagtgtgatgtgtttgtgtagtgtcattcttgtttaagacataatatcaagagaagttgtatattaatgaggagttcatagtttaagagtgataccatacaatctaccagttattaatgtctaaatgaagtaagcagttcaagaataaaaacataattgaaagaaatagtggttgatatgagcttagtctactatgtataaatccatagtaaagatacatgttgatatcatgatggtagatacagtaaataacattgtatgttataggtttaaaagagcgataaaatttactagataatattaccataataaacctagaaatgtagctgcaaatataagatgtgataaaatagccattgatggatcagattaatccagtgtattaagtttgcgttgtttacattgtttctatatcttacacatgaaaagagaatggtcaaaattcattgacttatttatcacaaaataaataactctatcgttgttatttttattcattcgaaaattgtggttcactcatattttgtaatttaaagaaagagatagtgatatatatgtttcagaaactttttagaaagagctcattgctttgtttaccttggtatagttggtggattaaatataaattgttcatataatcatttgacatgggaaataatttttgctctacccatgggaaaagatatcttggacagtttttagagaattatgagaaatattctatgcctaataatacaaaattattttccagaaaacaagatcgattcaaaaacaatctacatgttctatatgcagtgaaagccacaaatttgaaaaatctgcttacgtttttcatttcaaagaagactttgataaatagatttatgttaaacactataccatctttctactgtttatgatcaagcatttatcctatgaaaatatttaaaatgatatttaagttaaataatcttaattgtttatggaaatataattttgtagatttaacatttgaaattagagtttcagggatgctaatatggcatttcttagaatatagtagacttaaagtctaacgttgttatgttttaagtatttagtaaattggatttctcgtttattgaaaacccatgcaaatagtatatattgtatttattattaaatacatattaatcttgcaaaaaaattaccaacgatctaccaaaatcagtttttaacaaaaaagatcttgtgaacatactatatattgtctaattatattatattggacccaactataccataatctaatattgataatcaatcatatcatctatcacaatggatcaaagacctctttaagtaagctttgatataaaatttcctacgtgggttatctgataatcgactacaaatactcacacattcttatttgtattattgacaacatcatgttccagaacatcagatgtgtgaattaaatagttacaacttaataaataagtactcatagtcaacctttagagcctagcataatttttccatatttgtaagttagacaatcaacaaatattattattgttgtttatttattaaaacaggtctcttagcactgtggtttgaaatataaataaagatcacttctctggagaacttgtaacaactctttatttatatataattacaactgtagatatttataagtttttgtaatgttttgggtcgatcttctcatcacaagattgtatattaaggtattcatgaaatcggatatcttgcttcaatactatttacaaaacgtgaagaattaatactagctaaatagatataaacagaatataaacaacaccctaatacttttgattctcaaaaaacttgtgttttaacaacaatacagccaaaacagcataaattaacatattcaagacctcaagaactataaatatacgaaggattgatatgacattttccaaactttcatgatgattaaaccaaatgcaagaatattattaagaaagtattgtcaaaaaaacataaaagaaaaatcaaatattccccatcataccactttaaaagtgttcttcaaaacaattcaaaaaacaaataaatacaacagtaatataatcatagattcataaaaacgaataggttctttctgttttgtcttatccttgtagaaaaaaaagattgataaaataattatctaatggttgctattttgtttattgatgtttaatacaagattttacaaaatattttatcgattgttacgtgtctgcaaatactttcatgtaatggaacttatcctgatgttaacataataattttattgttaataagatccatagggatataagaaatttataagatgatgtattgtcgtgataatgaaatacattcacagatatctttatacattcatgttggggatgatatccgaaggtaattcttactatagaataaggccagcaacaacaagttaaaaactatatctgagtataagtaagagtgtttgtataactaatacagaaattatatcaattacagaaaatgaattctttgacaattacccatatacaattcatatttttattctcaagagtactatggtatagttcatttgaaaaagttatgacaactactgttctagaaaattaactgtcagaatgcaatgaactttccaaactcaaaaataagagagaaggaaatactttcagaaatagttttgtggattgtgatttctttgaataatagtaatagtcatagcatatgaataatcattctgtaaattcatagttgcctctcccacacctcacattaacaatatatattttattatagtatattaaagttgttaagaattggcactcgtagtcattgaataaatagtaaacattctcaatactgtaattggataaatatatattacaaaattgtattaaagttcttccatcttcttctgtatgtataacacagaaatgataatatgtgaaaagtatgcgggagaagaaacacgatttgaaaaaatgttgtctttgtgtatgttaaattttgttacttctcttctatgaatggcaaaaatcaagcaagcagtattattaacattttgtgacatgtaagcaacagttcctcagcattccagtggtgtgatatgttggaatctcattgttccatttgtttcattctcaaatattctatttcgacgacataataaaagtaacagtataacacagaaattgttaacattcaacaacaaataatggagttataaaaccacaataatttaactgaacattaataaataatccatatatactaacataatgaaagtttaataaactagcgtagcaaagaacactttagataaacttctatccagagaacttgaaatgctaatgtactttatttaatagttgaactatgataatatctaagaaggtatattgatattttaaaaacacaacatatattatcacactatgaatatataccaattcatgttagaaataaaatataccactgcatattgaaatctggttttctgtttaatgagagttccaacatcactatttagagagaattactacaagtactcttttcttcttttcttctcttaatctacttttcatctcatcgttgatggaaaaactgctgcagcaaaaaaattctgtgatgacatcgagaaaaaatatttaaaaattttaaaaaatacaaagcacgtaactgtgttttgactagtatatttctttgtgagtgttaagtaactagtttaaacaatgaatgctacgattagaatatatttcatgttatatctgctagatttctccagtgtggttcactctatactttcccactagccttttgaaaatattttctgtttatttactgtacactagaaagaacgagtatacaagaacactaattataacacttcaagaatgacactgccaatttaaaagtatattagaatatcaatcatccaaggattgaagaataacccggagtaatgactaatgtgcatacaatttgaacaaatacaagcaacgatatttaataaatatattttattgtagttaggttaagtcatataaatactatttctagagactgtatttttgtgatattgcataacaaatatacaagaagtaactaatgtgatgttcctaattgcatattccatttgatggacactatatagggttcttactggttcaagcaaagttgtactagatgaccatattgtaatagaactagttagaatattcacaagtacgtgccacatgaactatttgaaatattgtgtgttatttttatcgagcagagttggtttcgtgcattcttaagtattatacttatactgtattgaaaaacattaagatataagacagctgacaaatataatagtggtattctataataactacttttttattgtggaaatttcattctaatatataacaatagaagtaacatagaatataaggtataatgaaggcgtgatactttacaaagattagtaaaaaagtatggaaatatgatgatgtatcagtggtgagaagatacgtttatccaaaggttataatattattatgaataataaacacagaataagttatatgaaacaattattcgaagaagagataatgtaatatatctgaatttcacgaagcaaacagatggatgtgaaaaaatagtagtttggtaaagttgatatttcattgtcatgataactcttgaaagagagtaagaatatatatgttgaaatacaatggtaagaaaagagaacttctaagaattaaataacaaacaaatgaccaatataaaaggggtattaagatgttataagagacgataaaataggctaaataaagtgatattgttagaataagaaattgattggtaaaagaattaataatagtgtgctaatggagatcactgtctatttataaataaaaacaagattcaaccatgaaatttttgaacaatattagattctcgtgatcatgctttttgaattttattgaactaatttaaagaggaagtacatatagaataggattagatataacataataagaaaatattacagagtgtgagtgtggtgtaaactataacatagttgagtatattatattttgttgatatgcaggaattagtaaatgaaagtgattgttgattgcgaatgcacatgctaattatttccatatgatataaaaagatattactatgcaaatagtatatcaaaaaacaaaacaaaatcctaattcaacaactgtatggataagaatgattgtatattgctagattgtgataaagattaaatcatataaacaaataaagaattataaaggtgttgaagcattttcattgtcaattaaatatggaaataatgtactggcaaaaaatacggtaatctaagtaagtttatattgttgtgtgttcttgttgctagaatcatattactcttgtgttccttgagagtatattttagaacttgtaaaatattattattaaaaaatgaaaaaagaagtggactataaaactatgaggaagtaaaaataactgcaggagtggtagttgcttaataagtgcttgttaatagaatgaaacaaatgtggttgatatattgcagatgttgtgatttagtttgacacaacagatctgtaatatgaagtagagtgtaaggagattacattcttgatattgtgataggcgtgaacactaaatgatacttgtatataacgagaaatgatgatatatcaatatgtgatattgaaactgtactgtatattcttaaaaattaatatttaatggataatagtaatgagagagataaatatatgtagttatatgtgagatcagtaataaaaagaatgttttagagtgtaccgttgagatagtatttccagtaaatgtgaagtggaaatggacatttaaaagtaattatataccaaggtgtatatatatttaaataacatcactgtgttgtcagtagtatcttatgtatataatctagtattagtagtctgcttcatacgatatattattcttcacacacatggatcctcatactattttatgaacatatcaatactgtcaattgatatatacagctccttatatcataatttattaactgtctttataatatatcttaattaaataacagtacttactaaatatactataccatatggaaatataggtctatctaagctgttattttatatattattagtggtatatattaatacaaatgaacatataataagtatattgattaatatcccccattgaatatttattacaatatataaaagatatatatatacatagagttgaatattataaataggaattaggggataaactaccaggtaagctaacaacttttaagtctgaaacaagttgattcgataatatatataataattaaagaggaaacgtgcagagaatattattcaatcctaacacagttgtattttagctagttagggtttgatttagttattactattccatatagagaatacttctaatgctagaatttcatgaagaaactaaataatagagaaaaatgaactatcttttacacaccatcatctcactatttatacctcatataaagtgacttgtccgttctacttaatgattaagaaaatttgtaatataattgaccttgttattattttaataggccctttatatggatttctatgattcattagcataaagtatatattatccttaaattattattaaatacaatatgtgtttataataattttaataaatatgtaaatattcttgatatgtttaatacttgtaaagatataaattattatatacaatcagtaatagaaactaagcattttaaaacaggtattcacagggttaattaaataagtaagttgaaatgcttgtccaaagaaagatcgctaatgttaggtatcagtaaatatgattgttagatcacgttgaaactcaactaccgttaataagcttaggtactagaactgtcacaacatatacaattttccatatcatttcgttacgactaacagatggagagtacttaatgatgtaatttgtgatggtattatcagttagtgaacaagatggtacaaaattaaacctaaagaaataatgaatatatcttatatttctagtaatttgtataatttattaagttacacattatattctcttctctctatcatacatttaatattttgaagtgctatgtgcattaatacatctacttctactgatatcctagtaatagctcttattaaattacactacccactacaactatcactttacagcatactatttttttattacacattatatcacaccatagcaaacaatatagaatagccacttattcattcttacatgacttttttgatctatacctactagttggttaaaacagcactgtttgtagaactgtaactgccaacatatgctaaaattgtcttcttatcttttcattctttttcttttctgaaatctaatttttcttaaattccaaaaacttttttcaatcaaataaaaacaactcaaacagatatcaatcactgcaccacacaaacactgatgtaaacaatacaaaggaaacctgcttacagacaagaacacatcctcagttgagatctatgcatttcacaaattcacattatataacattgagatactaccattcaacatgatataattatgccataaatatatttgatacagccaaccaagatatccttaactatagagagtatattcacgacaatccactttgtacatgggttattactaaggaagatatttataaacaaaatacatctatctttatggtatggttgctctattgctatgagtatttacaaatacataaacacaaacacttacagtatcttccacctaaatgatataatctgataacatatcaatttcacatagtgatcacttcaatactactaccatgaaacctatccatatagatgaacctcacagtataattatcaacactatgccaactaccatcgtactactacccaactacatcacaaatattacatccaaatcactcacaaaaatacaccctaccaataactaagattatatttcttcctgaaaatcaattcattattactgactgtcaagtggtaaaattccataacactgttgtcaattctcacaacaccaacataatatccaacaatcaacagtattaaatcaaataatacacatatatgaacatgtaattatactgtaattaaaaacaaaaatggtttaagtgcgagatacacaacagaaagtaggttttttgctgatctgtgggaattattttatctgagttaccatatttatatacaattgagaaaagtggaatagtatttggagacatattaaatttttatgaaggtttataataataccagtagatgccattcctgttggaaattaaacaactgttaccacatgatttattaacaatcaagttattttatttgtacatcagcatgtattgaaatgattaaaaggtgaaatgttctttgattaattaaaatttactgaatttgaaaaagataaagaatgagaaagagttaggggtatagtatatggagacctgtttgagttggtgtattacataagccagaaatgtttaacttgttagatagtaagatgttatttaagatagttgtaatgataattttggatatgttacctgatgatcaaacaaacatattaatatataaattcctattaagagtataaaagcattctaaataatgatagctttcttggttggaatatgaataattaataatattaataacaccaaaaatatattcagtaagtaatagtagcgggtttaattattgctcatatagattatcatctttttctatctcattgtcatagtgttgtattagtattgggataatcaaagagatcattttaatataatgaattgtagtatcgcaaataattctgttaaattaatacaattaataatctactagtgtgatgtttataatgtagaatataattatagatacattattggaagagttgttagatcatttataacagattagatagtttgaaacatgttagttatgttcttgttctaatacttatattcatattggtaatattacagttaagatccaagatagcacacattttagagtagataacaacacagtcctagtataataattaataagttattatacatattcagagtttgtttatattatttattatccagaatgtttaaggttgtaattcatttcaagatttattctgctatgtctaacaaagagtaataaaattatcagatgattgggatatgagtagaataaataatgtccattaacattgctacaataaaaattaatacatccatgtaagttataaaaatttatattaaagaagattcgaagataaaaggagtatactgtataatattgtatcttgtatattagttatgtagaaagaaaaaaccaagcaatacaataacaatttatagtaccactaatttcttactataaatatcaataaaacttataataccaccaatatcctattgtaagttacatttttttattatattggtctaaaatgaactctactagaatttttgattccgaaaccttgcgtcaacatctatgaagcaatattaatatataattggtgttgaaatagaatgttttatgataaaatagatagaacaataagattttagcagacactaaacgataaattgttgagtaataattgttgagaggtcaccaaaagttgttgagtttatttattaaatatcttactgttcgtagaggaaaatggctgaatgttaacatatataaagccaagaatttcatcatacattatttttatcttatttacaatctttctatattattatttctatgttgtatataaagaaagaaagtgaagaactttattataattttgtatactaaatctgtttaatataatattgagaatgtttactatatatccaatgaataaaggcgctcattcccaacaattggtgactattttgtacaatttttacaagaatctatcatctcttaatatttatatgtcgttctatatttgattttttcttttccttcctttttttgtttgttttttgcatatataatatttaagtatagttattaatttcattcttgtacaaactttttgaaaatctttaaaaaagtccagacaaaaatttgtaaggattcttataaataatatacaaaaatatagatattaattatatccataaacgtttacgaatcacataatggtcaattctaaactagcaaattcattatttttggctgatcttgaatacctaaactgatcttaagttattttattttctgggtaaagcttagaagatagaataccaaccttaaaactaataattacctctggcacattctctcaacaatcagagatttcttaaatgaaattttcagtaatctgccaccaacgttaatttgacgatcatttgttcgaatatacttatgacttggcttcaaagttttggctaccccaagtctttccccttaatatagggtgttacctgtagactgcgcatttcagtattccaaatagagcttcttacgaaatttaatacaactaaccattgtgaagaactcaaattaagaaatcaaaaattaagatagtgaaaaattctagcattagcatctgcatttaagatgctactaaaaatcataaccatgattaattagtataacccttcatacataaattgcaagtatatttttttaccttcttatataatagaaaaaaactgagagtatcatgaacaatatttataagaaataattatttacaacctataaaaagaatttgtgaaattattactttgttttcttatcttgatcctaatataaaattccatcttcgagacaaataatttttctcatctatatatatatttttttactagcctatatcataacaataccaacagtttgatttttagtaatacctatcgaattatcttgaatcagcttctaaaatactagttaagatttatttaataatttttctatcctaaaaattgaagagtataacgaccatcatacactcaccaggttaaatttggtaaaaaaactcaaaaaaacgataataagaatagaatgcacgaaacagttgatacatttcttaaaaaaatacggtattctataaatatcatttattttatttttcttcaatagttagactcaagattaagacaacttttcacaatacactatttaaatctttaatttagactggtgcttataattttagtaatgtcagaccagatttgcttctatgtcacaagatcgattaaaatatgacaccacctacaccatcacccttgttaacggtgacagttcttcgtcttcagaagttgttgatattgtcaccccaccttcatccaccttatacactactgcctataaccatctaaggggtaaaaatactacagcctaacaaaaatattatattttcttttgtttttctatacaactgtccaataaaaataaaacaaaatccacttgtttatattagttttaaccaatatatagttcagagtactcttcttttaaaatcattttaaagatacactcaaaagaatacttcacatagcatactataaacatctattacctacaaattcttatattttaacacatattattttttaatcataatacttctcatttctattttatactttccataaaatgtactggaaaccctctataaaagtgtctatcctacacactgaagtatcgaaagactggatgagttttttctgtaatgttaactctaccatctagccttaaacaggattattacatgctacaacaaggaggaagacttacgtacctagtctatcttcctcaattaggactccttttaacagttcttcttttttcaaatatttgcaactttgaataacaatgcgatctcgaagaaattctatccactgaattcggaaaaacaaaacaaaatctaagctttttttaatggacatttccctttttgggataaagccgtagtgtttttgtcataataatttttactctattgtcaacggctttcgagctaaatctcacgaaaaatatctgcagtcagagaaaaaaaatttttcgacttgtaaaagaaagcaaaatctttaataggacatgtaaaatccataaattacacaactactggaatcctgttgtaggtagccatttttcttttgaagagacagagattagtccttttaatcttgaatttcacatgggttagataataaaacaccaaataaacataaataaatatctcagaaaacttcccaattgattacttttgttaagacccctgctagccaaatctgttttaatgatagagtgttttctattattatatttttgaaacagacatccaacaattactacaaatcacttcgttttccaaggatacctgtcttcgattttctttcatataaatcaaaacaggttatatgggactgttgtaataatagtagtcatgcttctgcttttcaataaatcattctaaaatcttctggatttgtcaaaatccttagaaaacacagtcattatgaataatataaagaaactcaatcaaacatacaacaaatatgtcaaatatatctgtgtaaatatagaccatctcatattttttagattttcaaatattatcattaattatattaatatgatattgtctttaaatagtcagtgatacacttaggcattatatgcaataaaaaacacaacaaaacttttttcaagataaattttatactaatggggcgatattatcaataaagtagtagagatttctaatattacacatgaataatcattcaaatacagaataaacacaagttacagcgagtagtcttcactgctaaattaacacttggacaaaagagtggttttaacaataaatttgaaagataaaatctcttttgagccatatattgaagatgatagcttactaaattttacaattgtaacataaaactacaaatattttatggtaatttggatactacaatatgaaaatttgttattaaaaataagcaattaaacgaaaggaacaacatttttagtttgaattttgaaaattaccaaatttaaggaatattgatgtcctatatctctgttaagtgtaaattaaccttagtatacttggcaattaaaacttgaaaaggactctaataaataaatatccttagtcgctagtaattattaaaacatctctattatacgtaaaagcaccaaattcaattcaagatatagctaacttacatttatctgagtattattcagttttgtgatttgttataaatctattaaatctttttagtattcctaaaataacaatagcaatatacacttgaattgttttaattttctttttacctctaaaagaataaatatactcaccgatattaatgtcgttactatgtctctccaagatactgtaccgtaattaatttttgcttttcactatgtttctaaaacaatacttctaatacctcctcaaatttataaagcatgaaaattttgatggtttcgtagttatataaacattttcttattatcattaaaattggagcttttgctcttcaatgaattaaaatatgttcttaggacaatatgctttataacataatataaaagatgtttacttatatctgttagaagtgttttttgtttttttaaagatctctagatatctgatattcaaccgtaataatataaaagaatctcataaatgactgtatcaattttccctattaattgaatactaattagaaatatgcttgggataaatcaatttgaacttacaatttcatttctatgaacttcattttttttatataatacaggatacgacaatctcttgttatactaaattcttatgggtcaaaagattttgtatatatcataatgagtatgttttgggcattatttctgttaactataataaatattatacaataatgaatcaactacttcttgtaggttgcggattgcatacatttcagactagaaaaaatgattcacttcctaatactacataaaaacattgacgcaataacatcaacatctaatacgattaaaaaaatgaatgtccaaatttttctgatcaaaaacaacagaaaaaaaaactgtttttcttgcgctgaagtaatgcaaaaatgcatttctttcgaagtgaaaataaaacatttaacataaacaactttatctactatggatcgtcttaaaaaactttagcttacgtattgactggctattcttctcaacaacaccatattagttttcaaagaaattacaaacttggtatccaccagaattttccaatccatttgaaacaaaaacaataaataccatgaattattggaacaatagctatagcatattcccccttgatgtcaaatcacaattaaaattcataattaaaacgtttatagtatcataattgtctctgcttatttggaaacatctattagcccattttacgatgaaagcaagtagaaaatttcatgtgagtgagatatttctattttactattatgtgatcatttaaaggaaaatttctcaatgtttgttccaaacaacaacaggcaagatgtcatgcacaaaagtagtgtaaaacaacatatttgtgccagttgcataaatgtcaaaaaggaaattgcaagatttgaaaacaaaactactatttacaatgaaattatgcaatcttaaattcgactacgttattatagttaaaatgccaaataagcgaatgcaaataatttctaggctttagcatctattgcaactgaaatattttgataaatgataaagattggcagtgttgtattgatgctaactttagcaagttaaacttaaatcaggttccatagagacaataacttatgtggagttatattttaacacatatgatagaattgatgattagcacagtagtattgaagatagttggtttatcttagacaataatgaattttatatctaacatttctattacttgagccttagacaaattggatctccattttattaaaaactatgcagaaaatatatatggtgtttataaacaaacacacattgatccttcactatttctttttcttgaaatattttcttcaaaaagttgttttaatgatctacaaaaatcacttttaaataaaaaagtagtgattatctgcctattattcaacagttttgataagtatactaataattaaataaaaagaaaataaggcaaaagctagtggatattattttacaaataaaataacagagagacttttcttacctatggttataatattatatatatctagaatctttattgctatatcataataaatagaattctaaaatttattagttcaccattaaataaatatgaaatccaacctttattaatgcgtttaaataatttatatattacaacatccaaaatttttcacataatactattaatacttacaaatgaataatatttaatgacatagtttttggaaaagataatacaaagtgaaatattaaaaactaatgggtgtatattatatttctattattttgtatattttattaagtcttaggatataattagatgtaaacatttcaagtatatataatgacagtttgatattatttatttcacacaatacatcataactaaaagttagatttacaataagctgttaataatcagtggtgtgtatttgttacttgctatattggcaatcttacttaaaatatacactaccattagattaataattaattatactcccaggaagtacattcctataatatttagtaactttggtggtttcctcattagaaatgtcttcaccaagacgctggatagattatcaccaagtggaataatttttggtttatttgtttgaacgttatcgaggtctacctgctcaggtagttccacaaggtcgacagtctctgggtctttcgatattccttttactttactcccattcagcttagttctcttagatatagggttcccattcagtatttgattcaaagatacagatcttttcatttttacatctattggagtagtttgattgttttatattgtctctttagagtatcaaatatgatcattgatatatttcagtaggatcttcagatatttggtctctacgatagcattgaaggattccatatagatagtgacgtattcttcacaactgaaatgaaa

SEQ ID NO: 18 - DNA, 4600 bp, Kazachstania heterogenica
  source 1..4600: mol_type = genomic DNA
aacatcttcctctctctcttgggaaccttgtttccataattgtacgaaattgtcaattaaagattgaccaatatttgttgggagtaagttaaattcttctactggatattctactgtaatagtcggatcaacatcttccatatgacaataaaacactttgttatctttatcgtaaccgactacattaataatttcatgtactcttaatttcctttcggcagcagtattaggcggatcttttggatagcggtcttttctacgttttaacggttttaatttctcaacattaataactctgtgagtctttttcgtcgaaggtaaatctaattcgtaagcattgtcatttattttcttaactaccttaaatgggccaacgtatatgggttgtagctttagatattgacctctcttaaaataagcatcacgatgtagcagtacaaaatcaccaatttcaaaggtaacttccttcctccctttgttatgtgtaacttccatgttgatctgattctcagttaagaaatcttttgtgcgtaaagtaagtgctttcaactttgtggctagttcttgtgttgaatcatgacgggaagaaacagcatctcctgtaactatgattggttcattagggatgtatccaatatctacttcaaaaggagctgtcttggttacgcgattgggagtagagttatagacgaattcgatgtgaggaagtaaacgatcccattgtctatgattgttaccagtataagtctttaataacctattaaggatctgtattgtacgttcagtttgaccatctgtttgtgggtgatttgctgtggacattttcaattttatattcaacctttttgccatttcttggtattctgtagaggtaaaacgagggtctctatctgaagtaatggaatatggaaatccatggtaagcgaaaatataacggaataaagcattaataacggaagtagtatcaaatgggtaactaccagcaattaagtgagttctttttgaaaacatgtcgactacaaccataatcatgtcgttaccttgttctgatttaggtaaaccagatacaaaatctatgctaatatttaaccatcgaccttcgggaacttcagaaggcatcaataagccctgtctattagggcgatgagatttaatcaactggcattgtatacaggaagagacatattcattaacagagtggtgtaattttggccaataataacgacttgcaattttattgtatgtaacggttgaaccgaaatgaccaccataaaggccatggtcgtgatatattcgaaggacttcatttcgtttagcgtcgggaacaacatagcgttctttaaagtaaataatattgtcattaattgtaaaacaatggcgaaaggttcttgataagttcaatttcttcatatatttcttgaacaatgatgagttgcaaatgggtaagtcttttgtatcaagtttggtaatataaacaaaacaggcagcacataatgggtcagctaggtattcttcgtaccaatttttcggatctaatgtgacggcagcatcttcaatagcagcaatattgtaatctgctctggaaatagcatcagctactacattctttggacctgctaagtattctagtttaaaatcatattcggctaattcatttaaccatttaattactctacgagagggttctttgttcttttgtgccgttagtaaactaatatggtctgttctcaatataaaatgcatgccatgaagcatatatttaaaatgtgataaggcttcgacaatggctaggagttcaagatctccagcagagtaatttttttgagcgccttgtaaagtttttgaaaaataacccacgaccccgagaatttttccttgctcattcacttcttcgagtacagcacctaatccattctttgaagcgtcggttgttaatctgtaatgaccatcgtgtttaaaggagactaatattgggtttgagattaggtgtgactttaatgtgttaaagctctcatcttgatccgtcgaccacttacttttaccatgtatgtaatcctgaatcggttgttggatgtgagagcagcggggtataaagcgtctataatagtttatcatacccaaaaatctttgagcttctttaattgttctgggagtgggaaattgttctatagctgcacatttcgagatcaacggttggattttattagcagagatagtgtatcccaaaaattcaacagatttagcggcaaagttacattttttcttttttacaattaatccttcttgagttaacctttgcaatacgatgtctatatgtttccaatgttcatcaacggaacgggagtgaattaaaatatcgtcgaggtaaacacagacatatggtaagtccctaaataaatcagccatataacgagcaaacgtgcttggagcattaacgagaccaaacggcatgacggtatattcatactttccattaggagtaacaaaagcggttttgaaacgatcgtccattttcataggtatttggtgataccctgagtggaggtccaaagttgaaaaaatggttgaagagccaatcttggccaataggttgtcgattctaggtaatggaaacgggtctttgattgtcacagtatttagagctctgtagtccacacataaacgatatgtaccatctttctttttaactagaaccactggtgaactacagggtgacttggagggtacaatgaatttcttttcgagaaggtcggcaacgatcaggtttatctcttgttctatttttggtgtcgtctgatatggctgtcttctaggcaggcgtgcacccggcttaatttcgatctcgtgttcaacctttggaggttcagcgaatttcttaggtggtaaatcatcgcggaccgtagcagaatatttctcttttaaccagcgaggtagtttatcaaatcgatcatctgtatctgtttcagaaatctttatagcaaacacagcagcagcattttcaacatctaattcttcggtatcattctcggtaagtacggatacaatgtattcagggaccggtttcttgttatttaatatcttgtggagcagcgggtgagatgatataatcgggtgtcctattatgatttcaaaagtaatagcatcagttatgtatacgggtgttttaatttttatgtcatcgagttcaagtaaaatttcggtggattcgttagtgtatgacgattcggatgatacaacacctctaaaacggaatggcggagcggtagaacgtgttaacttgaggttgtcagcaatatcggctctaataaatgatgtgggggaaccagtatccactaaaacattgacaggtttttctttaataaacattttaatttggcaactgttgcctacgagtggatggggagcggacacgatgggagctagtgtgacggtgttgttgtggaattgtttttcatttgggactgctcgccttacggttagggcagtcactgtagcggtgtaatggcttgtaacaatagaaacataaaccatgatcaatacaatattgacgagagggacgcttaattggttgtttgtttgcttgggaagatttgtgatttccctttctgccccctcttccgtgtgaacgataaacagcagcaacttgaggatgatgatcagtagtagagtccatagggactgggttaagagcagcggtcatatggatgtctccatccatatcataggtggtgaaggtaggaaatgaacggttggtgatggaaactgtttcactggcagcttccatagcagcatcaacagtggtagggcgagctagagctaccatacgggcagtatcaggagtaagaccgcgataataaaaaagtaattctcccttgggagtccaaatgtttgaaggcatcaaagctaatagttgtgaaaacttttgattataagcgtcaatgccaacggtagcttccttcaagcgttggaacgcattgaggatggcatgagggtcgatcataccaataaacttatttttaaaatccacaaggaattgttcataggaatgttggtcatgattacggatccattggacataccattgagcagcgggtccagttaagtttcggccaaaaaaagctatacgatccacatctgtttggaggtttcgagcataaagttgtgcttcgacagtaacaaggaaatctggtagtttaaataaatcatagcgaccagagaagcgcattggagcagtactgtagtatttggaatcggatgggactggagcaggagcagaagtagggtcagcggttaggttagtagttggagcaggagtagtggttggtgcggtggtatgatgttctgtagccgtagatgcatcaatagcgtctaaaaattcgttcatatttaaattattcgaggacatgatgaaataaacgctaccagttgttgtagtatggtgtggtgaagttctttgtgtattccagggaagcgcaaataatattaatagtaattcaaataatcgagacagtaatcaactatagtcgatagtataattactaaaacggtcttatatattaagcggcttatatcgagctaatgtacttattcgaagttactt

SEQ ID NO: 19 - DNA, 673 bp, Kazachstania heterogenica
  source 1..673: mol_type = genomic DNA
aagtgggagtgtgggagtgtggtgtcgatataatatagtgtacgggtgtacgggtgtacgggtgtatgggtgtatgggtgtatgggtgtatgggtgtatgggtgtatgggtgtatgggtgtatgggtgtatgggtgtatgggtgtatgggtgtatgggtgtatgggtgtatgggtgtatgggtgtatgggtgtatgggtgtatgggtgtatgggtgtatgggtgtatgggtgtatgggtgtatgggtgtatgggtgtatgggtgtatgggtgtatgggtgtatgggtgtatgggtgtatgggtgtatgggtgtatgggtgtatgggtgtatgggtgtatgggtgtatgggtgtatgggtgtatgggtgtatgggtgtatgggtgtatgggtgtatgggtgtatgggtgtatgggtgtatgggtgtatgggtgtatgggtgtatgggtgtatgggtgtatgggtgtatgggtgtatgggtgtatgggtgtatgggtgtatgggtgtatgggtgtatgggtgtatgggtgtatgggtgtatgggtgtatgggtgtatgggtgtatgggtgtatgggtgtatgggtgtatgggtgtatgggtgtatgggtgtatgggtgtatgggtgtatgggtgtatgggtgtatgggtgtatgggtgtatgggtgtatgggtgt

SEQ ID NO: 20 - DNA, 344132 bp, Kazachstania heterogenica
  source 1..344132: mol_type = genomic DNA
cacattctcagcagatttagtatacaatattataatagactccttcggttttttatttatgtatataatgtataatgataaaatacagaagatgagcaatggaagaaacatgatatgaaaaaaaaaaatgttggctttatatattttcatatctcctctatcttgtctatgtatggcactaaatttatgatgaagtttgtttacatctactgacatgcaatcaatacatgttctactttttgcttatcaattaatgtttactaaaatctaattggtctattatttattctaaaacgttcgatttcagcaaccataacttatttcagtcgaagttttgggaaataatttgtattttaatccaaagtaaatatttgttaagaatgtttaaatattttgagatttttcctaaaacaagatatagaaaaatggaatgtcatattttcattttcatttacaattaagtttgaaaaacctccaacaaaatagaagacggacttgtatgatgtagatcatgaattacaatttaaaagaaggtttcatatataattattgttctataattcctatacatcctctaattaaaacacttatgtcacagacattttaataattttagataactttttttttttaatttgcaatatcttagtattgcaaagaaaacatccttgtagtatgttgatttttgaatcatttgttaactgttaatacatttattttccgttatcgatattttcaaaccgtatgaatccatattttttaattaatggaagttataattaaggtatgtttgctatatatattcaaaattaatgttcaaaactaagacttacttgaaaactcaaggcaaatgctctttaatagaagtgttctttcggctaaaagtatattgacttaactaatgtttttttctaagattaaaaactagttattggtaagaatttaaatttagaaatgttattgttttaatataatggaggattaatacactacctttatatacaataaacatattttcaagccataaagtaccttttgtaaaaaaagataaataaatggaaaaaacaattcaagaatatttacccatgatttgtcttgaaataattctcgaagtatctcattataatttcataatttcatttaaatttaattatccttttttaaaaatataacagatagagaagagggctacttgtacacttttttctttttgaacttctaactcaagtagtgttatttaatactattctttctttagagatgaatgaatagggcataatctatatttatggagttacgattagcaactgattgctgagggtgcttgaccatttttagaatttaaaattagaaaacttgttgctttattaataatattaccatagtcaccatatttttagtaaattttgtttgattttagaaactagaatattacattcactgatgcagtaatttccagtgaattacaaattaatgttactcaaaggaataattgcttaacatataattaaacatattaatttttttttgagaataatattggaaaaattattttagattattcaccaagatgagcaagaaatatactattgtacacgtatatatttgtaataaataatatgttctgatttatattagaaaagaagaagaagaagaagaaatactatataacgtttatcatgtccagttttatgtttatcaattgtggtatttaaaactcttctgatctgaggaactattttcaaagaaatttaacatttataaagacatatcatcaagcttattagtcattcaagcaatactttcaaaccttaataaattatactaagtctttgacaatccaacagaaaaaaaaattaaaaaagtgtcagaatcaaataaaattatgaaaaagttgtagcaattggtgcttcatttttcggactaaatttctgtcttttttttatttttttttctgacttcttattgcatttttttaaattcataaatgtcccctatcaaatttaattgtcatttaaaaaaaagcttggcaacaagtttggaaactataagaactttgtcataatatttcctccatttagctctactctatgtctaaacattaagacagccgcttttgttttggttttatcttttctctaattatttcttttctcaattttcagcttaaaatatttgatatttttttggtatgcttggttctgttaccttctttgattgatcaaacactaactaaagtactattttttttttcaaagttgtcaataccttaaaaatatagctatttaagatattgatttctagtgtggctctctgtcttttagtttatggaatattttttttctgtaaatatatataaacatgtaatggatatggattgtgttaattgacattttcgactttgtttccacaatatgtagtgttttttgtttctttttgaattagtatattcaagaaaacaaaaaatgacaagaggtaatttttactcatttgttcaatagttgaagatgtctgagataaacaacccaaaaactgctaataaatatggaagatttttttcaaaagcattatctaaactagaaattcctgttgaagaaagacaaactttatcttttttaagaaatcctgaccttttaccgattcgtaaagatagacaaacttggggattttggtccaattttggttattggggaattatgtccttttctgtaggtacttggatgtctgctgcttcagttttatcgtacagtttattttatccagagactattggaaactttataataggtaacgtagttactatcatgtttactttagccaactgttatccaggttgggactggaaagttggttatactttatctcaaagatttgtctttggtatttatggatccgttgttggtattttaatcagagtgttaatgagcattgtaagttattctcaccatacatggatgggtggtatctgtttgaacatgatattaaattcatggtcacgtcattatcttcacttaccaaataccttgtccaaaaatgttgctatgcaaactaaagggataattgattttttcttattccatatcataactctcttttttttacctattaaaacctcatcaaataaattacatcttaatcgcttcatgtctcgccacatgtttttccatgatgggtatgaccatttatttaattcatttagctggtgatgtaggtgatctcttcacttctgctaaaagtactgctactggatctgaaaaggcttgggcctgggtttacatgatttcttattggtttggatctttgtctggaataaataatacaaaaccagtcaatagtaacacctgcgtcaaaaatttcggtccgaggattaactaaagaatataaaaagttattgtaagagaggtttaagtggaaacaagtgttactgtgaaaaagtattaagcacttcttctattgtaacttcctaagactcttacagtgttggttcacgattgctttggaataggctgtttcgaagcattacgtgtgtgtggatgtatgttatatattgtctctgatatcaggaagaatttttctttataaactaaattctttcttaaaataccagaacataatatttttcgacaaattttctatttttattcctgtcaaaaagtaaataaaatattatcatacaattgtgtggacagataaagaagccctaaaagtgaaagaaatgaaaaggaaagaaaaaagaaaaattgatacttaaaccttaaaatgttcacctcattattgaaaaaaaataaaaatagaagtacagctctttcttagggttggttatcagtaaagttagaggaaaaaagaaaggggggagaatcaagttctatgtattttcatggtccttatagcaattaatatacatatttattcaatataaatggaaggaggaaacaaagaaaagatgttacatgatgataattaagatgtggctttaaattaactatctcggtgttaatatcttaataatcccttcatagttggccacttaaagttatgtggaataaataataaaatgatgtgtcatgttttctttatttttaattaaatcacaaatacttgtaatagaaataaaagcaatgtttaacactaatgaaattgaattaaaattagaataaataagtatagatgtataaatataaatattatagaagaaatatattgttaaacagaaaagaagatttatttgtttttttaagtacaaggaatatttaaataatagtagtaagtgagatgattaatggtaatagtatgttcaaaaagtggggaaagcaaacaaaaaaaaaggagaaaaaagtaaatgaatataaggtattattttttgttatcagttcttcttaatttccaaatgatctaattgatccttttctatagcttcagcttcagcctctaaaatgtaaggtaacagatagttaacatcatctttggccttaatccattcatttcttggtaatagatgatgtgttaactcttgttggtgagctctaataattctataatttctgctataagattcatcttctggcaatctccttaacgcagtttgcaggattggattttcttcagagaatagatcattatatcttaaacctaactttctgtaaccagataaattgacaaatttgttggcaactggaatacaaagtttagataagactggagatttgaggatataatcaccaactttcacgatggatgtaaaggattgtggcatcttatattatatgtaatatatgtatttttggttctgcagtgatggttactcaagtttatttattttttctctattttctaatatatatacgtacgtatatttatattattatcaaataattaagaatgtgatttctgaaggtcgttcttccctttttctagaactatatgaaactagtcaataacagaagagttgagggatgtaataaatgacttagtagtagaaactaatttctttttcttcttcttcagttaggaggaggtctgtattaaaaaaaaataataagaaaaataaatagataagtgtaggagatgtaacaaaatctcaattgaataaaacggaaaagatggattattgactactggaaagaagactagttgatacattttgtataggcccaggatttatttatctctttgtaatttgacggcttttttcggtctactctatcttcgaagtcatattggggggggggaagaaaaaaaaagagagaaagaaaaaacaaaaaaacaaaaaataaaacaaagaatggagagagaaaagaagaagaagaatatttttcggtgttttccgcctctctgctttctgttttttttttttgttttttctttcactctgggaaggacggcgaggagagacgaacagaacagcaaaatttcttccctctttgaaaaaacgtgattggttcaaatgttgacaaaaccaaacagtagaattcttcctgcattttgtgagtgtttgatagcggtagtggtggaaggttgttgttgagtaatgggctaaatgaggactattttgttattgtatactctctcgtctatgtcttagaaaggaaccaaagtttttatgtacacagacattatgtagggagtttgttgtggtctctattcagctatgtacatctatatagatagatagatagatatgcgcgtattagctgttgtaatagtttagtgtggagtgggataaataggggaagtaaacagtaaatcaacttttctttcgtacatatgtcataatatatacatatacatacatatatatatatatcagttggtctatcaatgagtaaagtgataaatagagataggttcatcagaggatcaataatcatacttctattctattttacatttgataaaagcaagaacaaaaaaaaatttccaagaggccttgagatcatataaaaatgatataattattcatctattcattcattttttttcctctttgtttgctttttttccttaatagtggtattcggttggtctcttaccggaggtgtttgggaaaccacattcaaataaagatttgtcaattaaatctgggttagctaagattttgtcataggattcttggtctttaactaacaccataccagcatatccagtggcgttaatggaaaggtcaacattcattgaatcatcatcgtcgtcattatcatcatcattgttatcattagtttttttatcgtcattgtcattatcttttgcctttggttcatgtttgacgtccgtggtcttggcgtgggatcttggaaccaaacatatccaattcttggttaacaaaacgttataacttctaaccatgtttggtgtttcattcaaccagtcttggaagaatgtcaaagttctctgcaataatgaaaaatagcacatagccaagagatcctcatcaacagagttacagtcctctggtagtggtaagacaaaatgggcaaatgctactttatcatcttgcaatggttcatccttaatgtttggtaggaaatgttctttaccactacacaatttgtcttggaacattttgaaatttgaaggaatcctaaaagattgtaaatgtttatgattttgagatgaaccagattgtggaccagagttgtaaaacaccaagtgtctgatattttcatcttcatcgtccatcttacaaagatatttgtaagcaatcattaaatcctgtggagtcaatgcagaggattggtgttgataattgttggttaccaaaagggtatgttctgggactatggggtatttgtttagaagcaatttgtaagcaccatcaccatttagatctggggtaatcaatagatcttcgtctggattttcaaatggatcttctttgttgtcactctgttcgccattggattttggtttttcagctaggactggagcaaaatggaccaaatatggcatgccagttaatgaatccttcaattttttggagctagatttggttaatttcaaagaaccattagcaatggcattttcgtacttttgatggataagttcggagatatttgaatcaatcattttcaaaaaatgagtatcaattagcagggcaaagaaggggagaagaggtttagcacaggtgttatgttaattgctatattcaatatcgataacaatctgacttattcaaacacatacgaaacagagtagttccctaattacctctataatttaatatacccataaataaatgaataatactctagcattgacaagttttaccaatcattgtcactattattttccaacagcattgagaagaaagaaagaaaaaaggaaagaaaaaattttattctctaggagggtaactaaacaggtgtttgggtgtaacggacatgtatatccgtcttttttcattttttcatttttttatattttctgctttatcttttttggcagcgcagctgaaaagagttcattgagtttccgttacttggaagagatggctgctgctgtgttttgccattgattgattgatcgatcgattgattcgtagctttgcttgcattaattgattaattattttgtttaatgtatctaaatataacaatttcttcatagatcaaaatctaaggaagtcgatagagactgttttttactctattttctggtatactaaaagagaagaaaactatttgtgttaataatccgagtaaatcagagatgcttttgttcattgaaaattagtgtgcttaaactgtttatttgaaactagagttcttctgaaaaaaataacttgaactattttcttggtctataccttacaccctcaatgtatttaacgggtactttaaagaaatgatgaaattcacaagtactagtatccttgattcgtgttttcaatgataggaataacatcctagtagaagtggatttgagatctacaagtatgcacaaattagacgcctaacaatatatatatgcatacaaacatacaaacatacaaacatacaaacattcatgtatctgttatgttctctccatcttattctttgtatcccaaatacacggcttgtgcgtctttcggtcgttctcttctgtcttttcccgcttctccgccaccatagagagcaaattccgcggattgcttgcactcatcttcatcaataacaactcgtcatgtgtatcttcaatctttttaataaacaaacatcaacaactaataaaagtttggagattagtatccatattcaaaaaaaaaaaaatcaattgaataaatcttgtgaattgacacatcctttttatgccacttgtctttaaacgttgtccttctattttttttagttgctcttgtaataaactaattaactggcatatattgatttcaaattctcctaccatttagtttgacttttggctagcataattagaatagtacaatggtttaagtggtttaactgtctatctttaataagtataaataagttttttattttattttattttattttcaagaaaagtatatagcaattaacaataatttacatatagatacttttgaatattctatttgctcgctcattcatttgattaatcaataaaagtttatatcacagaagaatagaacgtaccttttggggtggtgtgttttttttgttgttttgaaataatttattaaagtttgatctaaaataaatacatatattcgtttttttcaataaatgacgatggccacagaaactagacaagaaattgattataaatgtgactattctcgaagagttttcacaattgcactagacataggtggaactttagcaaaaattgtgttctctccaatagatagcaataaattaatgttttattcgatcgagacggaaaggatagatgtgttcattaaattgttacacaatattatagaagcatggaaccagagcaactatgaaacaacacagatcattgccactggtggtggtgcattcaaattctacgatttattaaacaaagaatttccgatcctttataacaagataggtcaagtggatgaaatggaatgtttgattaaagggcttgatttttttatacatgaagtgcattctgaggtgtttacatataatgatcaagatgggatacgagagattgatcaattggttaaaagtgagtccaatggtatctatccatatatgttagtcaacattggttcaggtgtgtcaattttgaaagttgatgaaccaaacgttttcactagagttggaggatcatcactcggaggtggcactctatggggacttctatctttaattacaggtgctaaaacatacgaccaaatgttgacatgggcacagaatggtgataacaataatgtcgatatgttggttggcgatatatacggtgctgattacaataagattgggttgaaatcatcatcaattgccagttcttttgctaaagcatttcaaaataggaaacctgcgctagcttcgtcaaataaattaaagaaagatgataatgataaccaacaatttacatctactgaaataattcaaaacagaaataaattttttaagaatgaagatatttgtaaaagtttgctttatgctatatcaaataatattggacagattgcatacttacaagcaaagattcataatgtgaaaaccatatattttggtggatcatacattagaggacatttaacaacaatgaatacattaagttatgcaatcaacttttggtcagaaggctcaaagaaagcattctttttgaaacatgaaggctatttaggagctatgggggctctgttaaaaggcttagaaaagtaataacaatggttatgtatgtctctgcttatatatatagtaatgacccttatgatacacaacaatacatagaatgttaagttctttttactttttttttggtgaactgcgcaaaaatatatgcatgcaaccataatgataaatttagttattttgattacattttattttttttttttagaatcaggtattaataagtttgttatttacataatctattatatggaaaatattcttattatgatagaatttatcattaatatctttttttaactgatttatggtttgaaaattggtgcggttatttatgttatgtatggtaatctcttcaaaagaattgtcctgtatatttattttgattttaatattgtattgctcatgacatcggaaagtgatccctttcttggaatcttggtacagaaatttaaactcagttatactagtgttcaaacaagttagtaggtgtttttcttgtattttgattaacttttttattactttatcattttgttttaaattgtttaactctgaaccaaagtttttacttatactattgatattgccctgcgatttatggccattatgccaatcatcaatctcattttgaagtaaacctttttcctgtgttaatttcttgatatcatcactatttgcaatgcattgttcgtattgttgaatttcattagtttccttattctctaagttaattacttttttgtttctaacctcatcaatttcattcaattcttttaataaatcagaacactgagttaattcggtttcgaattttgctgttaaatcatttagttggtcttccttatttagaatttcttgacaaattgaattgatattatttcgtaaattttcaatctcgatttcccgttcatcaacattgtcttcttttaaaatttgaacttgattctctagatttttataacgcggatcctttactgacttaatattcaataattgttctttattatcactaattgtgatccttaaaaattgatcaagtgattcttgtcctaaatataattggactaaagaattcaacagtgatttaaactcatcaatcttatctggtagtgattccagatcaataaccaattcagagtccttattagagttgccttcgagcagattatcaatttgtaataacttattcccttgagatattacatttagattatcatttatttcatgtaaaatggaattattttgttctttatcttcagtgctgctttctgatattatcttttcaacatctcttttgagagtgtgtatttcatcgttataatgtgttatacggtttgtcccttcttgtaacattaagaatgtattaactaaatattcggagttgaatagctattacctaagtagttgctctaagtatatagcagaaagagaacagtaatcacagtgctatagaatatctttcttctattttataactgttcttttttccctttacttttgttgttatcttcagcgatgccctaaaagaaatttccaaatttttctaaattgtacaaagttttttaattcatgtgtttattttttaagatccaaaaattgagttaaacgaaaaaaaaataaaagataaaatttgtttcttatactgttaaaaaggattgattattttaatacaagcggtttttgataggctatatcttaagaacaacccaacctactgcgttttgcttgtgtctttcttcctctctctaacttttcattgataaactaattatattctggagaagaatggcttaaatatggtttattgttggagggaataggtgtgagtgaaactgggactaataagataagactaataacaagatagctaaacgatgtttaaagtttaatatatttgagaagatcttaaattgtttaactttttctttggttgttattgaatagtcagcttgtctatattgcataacttaagtttgttaaatctgtacatgatatatatgtgctttcaaacatttaacgaatgtgtctatatgcaaagaataaataaataagattttttttctgttctggttcttttttaccagtttatgttcagttgatgttttatcaaatgaataacacttattcaattacagttaatggatattcttgtaatattttttttctgtggttattttttttttctggatttgattggaatatgggcatgaatatgataacgtacatcgtttactcattcagtgactatatgtatttttttaacattcaactccaagaaaaattgagaatgagtgcttataatctgacattttatatttatatagtctagaagatttattacttatatttagtatctgaattattggtcttctttctaaaatcaccaccaccttttttccacaaccataatgcgtctatcccatatgttctaacagataaatttttagtaaatttctcatcagatgcaacttctagagtcaatattatttcttcagatttaattagatcccaaaacattgcgtatattttattcataacattttgtatactaccatcttctttgtaagtgtcagagtctatttctgggatcaattgataatatgattgtttccccagcttatagagtatacgaccaagagtctggatagcgatacatctttgtggtgcaaacgtagatttagccaatcggttcaactctaacaatgtataccctgccaattgaggatctgttgaatgatgatgaagtcctgaacggatagtgttatcgatctttctcgttggaggtaccagatttccgttaaaatcgaatctgaccattgatacatcatcgataataaatttagatgggtcatcgttacccggtaggtcaggcacttgttgcatccatttcaatttttcaatatcctttggtaaatcagggaaaaatttctcatgtaatctttcattaaaatttggatcatttatgtctaatgatattaaatcttcttcattatcagattcattaagagacaattttttcatgaaatggacatctttcaataaatcttcgtttgtcatatgatcaatactttgggccatttgataatctaaaggtgcaatatcatccaagtcattaaattcttcttcttcttcttcttcttcttctttttcgacatgttcagcttgtagagctgtattaaaactaacatgttttgttttgtttgtgattattttttccttttcgtttgcttgcttctcttcaaaagtttcattacgatctttgccgtgcaaagcccacccaacttgttttggatctaatttaggtagattttcattaattccaccaacccaggttccagaagcaccttcaatctcggcaaataaaggaggattttctgaatcctggatattttgtctacttttaatatttttcaaaaggttctgtatcaactttggtgataatgttgctaataattctttttgttcattaaggatttcttcatttgacatacttttcaaaacatttaaattttcaaagtggatggcgtctacatcattaattgaatttgttgatttatttttattaccagatattctagtagtagtggtggtagtagtagtagtgtttgacttttcctgttgttgttgtagttgctgttgttttttcttttcttttaatctttgtttccaagaagatatttttttaggtttatataattcaggaaaaccagtattttgtacagatggatcgatagttttctctacgatatcaaaattcagcaaatcgtcattattgttagaattattggcaatgcttgtatggacttctttttctataatatcacctataagatccatattttagtaaatagccttatatatatgtgtgtatatgtggtataacctttactgattaccttattaaaaaaaaatatgtttaatctggaggaagggcaaaacgtataacaaaaagcaatatatatatatgtgtgtgtgtatgttaaaagtagcgatgacttacactttagtaatcaaatgtctttaatttcgtcatataaaattattatatggattgaaaaagtggccctataggcgatatcattcgatacgaaaagaacaatttggatatataaatatgtataatacgtacgtgtatataaagaatattatcaaatgtatgcacggatataacagattaaactattgagccatacccactaccagtaggatctacagtgatattagcaggatcggtatttgtatcaatagaagaagaagaggaagtgatatgattgtgattattgatattagatgagtctacggtatgtccatcgtacggatgtttactaataacatataaagaatgtattaaactagggataaatccaaagaaaaataataaaacattgattaagaaatccttagtgaaaaaccctctttttaaccaaacagcaacaggtggtacaaagatggatacaaacaccagaaaccagtcgcgggtatgcattttatatatatagtgtatgttgaattcatagacaattactctacataacggtaaaatacggaaaattcatacaaataatgtgtatatcgatatacatatgtatgtatatatgtaggtatcagtgtgtgtgtgtgtatctgaagaataaaaataacaagcagtaatgaggatagcgaagtatttacaaggtgtatatagtcattatacattataagaggaagagagaaaattaatggaagattgcaactttccatggttaacacccatacaccatggaccttttttttccattctaccgatttctaaaaagtgtttactttcaaacttttgttttgttttgttttgttttgttttacggtggcagagtcctcgttttcgaagggctgggaaaaaacggcgggagaataagaaaaaaatttttattgctttatttctttttccaggttcgagaaattatttgtccagtggaaggaaatattgtactgtacaaaagaatcgaaaattgtctaattttgtttgactcacttccgtctctttcttcatttccaaagcttttggtgttttgaatcgatgctgttgtcttttcgcgtctttcttgctcttttcttttttctatatttcttctttttctttcgcggtttttctcgaagtcttggaaactgaatttttccagatttttcaatcttgcttcaatttattatttcttctgttttcatgcattacacctaagcatgactatatatatatatatatatatgtgtgtgtacgtgtgtacgtgttcatttgtacatgtacgtgaggtgtaaagctcttcttctcataatttctcttgtatatttaatctttttctacttcctttcccttttctttttcctttcttctctttacttcttcttcttgttctctttgcttacgtatagatccaagcaagaagtcaatcactcgctcaacagactactattaatccgtatacaatgcaattcaagactgttttagctactttcgctgctgttgctgctgtccaagcttctaacgcttccaacgctaccaacgccaccaacgccaccaaccgtactcactcttccgtctctactggtgctgctgcttctaacaccttgaacgctggtattttcggtgccgctgttgctgctggtgttgccttcttattctaagtattttaaattattattgtattatgacattgtttactaatatataagtatacttctatatataacataaatagacactttatttaactatacgtataataataataataataatacttattataaaaagatttaggttatgtttcttctttctccatatatatatatgtatatatatatatatatataatgttctaatgaatagtgtgtatgtatttattgatttttttttttctttttaggtagtcttcgtttgtgatgatgaatctcttgggtcttccttttattttgttttttttattgaatacatattcatttcacacaatcttgtttcaaataatctcggaattagatttaaaaagcgatgtgaaaaatatacataccaaaccatgctataccatattatatacaaacatatgtatatatatatatatgaaaagagaagaagtaaaatagaatattggtcatttagtgtgattatgttttatagagaataatcaattcaattcgtacatattcactcagcacataaactgtaacaaccacttattcatattaatacatttatttacttttcatccatctttttcttctctttgttttctgtcttttttcttttatttgtttatttattcgtttgcttttgcttttgcttttgcactttgcactttgctttgctttgctttaccaactgagggatgtcagacaagataaaccataaacaacactttaatgaactaaaatttaagaattataacaataaacttctatttaaaatacaatctttagacaaggaaaatgtgaaatgttgtgactgtaagtcaaccgttgatgtagactggatatcggtaaacctgttatgtgttttatgtatcaagtgttccggtatacaccgttctctagggtcacatatctcaaagatcagatctttgaaattggacaaatttgaggataacttggaactgaagttcttgatcaccaacttcactgcaaacagttttgttaatgatatctacgaatataatttgaatgaaaaccaaaagctaaagcccaattgtacagatttacaaaggtccaatttcattaatttgaaatataaaactaagaaattcatcaaaagagcaattgatattgatttagatcataatgaggttctaaataagtttttggatgttttgaaattgaacaatgttagaaggttgtacaagtttttatcgaagttaattaatactaatttgaaacagctgtccatcagttatagaaactctttcgattcaactttattccaagttagtttaaattattatcgtgtacagagcaacaatgatcaaaggttatacataataacggagtatttgctatggaatgatatgatcatagacagtaatagagatgatcttgctatcaattcaaatattatggctaatcaccaaataggttccaccgaactgtctaaatattgggcgttaaaaattaaaacatttggtctttacgattcatcacaattatcatacaagccaatttcgtcaaataagagtaatatgcatattactaccaccattagtaataacactactgcaaactcttctgcatcaagcaataacacgtcattgttacgtagtaaatcaaagaaaagatggagtctaagttatataccgaaatcaccaacgcaaaatattataacattacacaatgcattgaagactattaaagatagtactattaagaaataaagtaagatacttctttatcattgcctctggttgtatatgacttattttaacaagttactaaacaggttatgccctctcttgtctgtcttccttcttcatattgctttctcatccctgaccctttaatctttcctttttgttgttgcttctattagcattatttatttatttttcggtttttctttttaaaaaaaaaaacacattatgactcttttctttattttgatgctaaagtgtcacaaaatgatgttgatttgatttggctattgaattgatagaaacaagtgaattttagcaagtaatgtaagtaggaattgttaagactgtgcttttgtctatattatatgggaaggaactgtaaatatatactgtaaaaaagtatacagacaagagtaaagaaagcaataataaagaggagtggtcaaaatataataatgaatatagattctttaaataatgccttacaaccaacaatgttgtatcaaattcatgaatgcgtgggtaaaggtaatttcggtaacgtatacaaagccaccaacaatttgactaacagtacggtggcaattaaagtcattgatttggagaatacagatgatgatatcactacaattactcaagaaatctttttcttagcaagattaaaaaatgaatatattacacattatattacatctttattagacgattcaatgttgtggatcatcatggagttttgtggaggtgggtcctgctccgatttgttgaaatattgttataggcatgggttatcagaggataaggtggcatttatcactagaaatgttcttaatgggttagtatatttacacaatcaaaagattattcatagagatataaaagctgctaacattttattgactttagatggacatattaaaataggtgattttggagtgagtggacaaattcaaacaactttgaaaaggaatactttcgttggaacaccatattggatggctcctgaaattattgtttatcatgattcaaatgataattatccaggagatggttataatgagatggcggacatttggtcgttaggtattactgtttatgaattggtgacgggagcgcctcctttgagtaaagaagatccaatgcaagttatgatctcaataataaacaagagcccaccaaggttgttagatgatatctattcgcaggatatcaagggattcatcattaactgtttacaaagaaaacctgaagatagggctaaaccatcagaattattaattcattcttttattgttgtaaatgctgatattattgctaacttaaaagaagatgtcatggtttgtaataatttgaaaagacaatatcaaaaatttagagaattaaataaaaagaaacctctctatcaccatgttggtgatgccttatcgaacaaatcacaatcgtttggatgcagtgacacttgggactttaatgttaataatagggaaacttttgaatatcaaagaatcaagccttctcaaacagaatcagtctactattcaagtgctatatcatcaaatgtgttaagagacagggatggatcatttaataattgtaatcataataatatgactgtaactccattgacaatccatgatacatcatctttaaagaagaattatccttgttcacctttaataccagtagtagcatcacaaccagctcatcgagtaatccaaggtgtatctcagaataaaataattaagtatgatttaggatcgggaatggagatagatacgaagtcaaaatctttaagtaaatctttaagaattaatcaaaatgaagagatcgattgtataaatgatgtgatcggctattgttttaaacagatggaaataagagctaatgaagaagagactaaagcttacgttaatactttatggcagacatttcttgctattgaaaatgaaatccctggctttgcagacgtgtttgtggaagaatttatgaataggttagaaatgaaaaatagttttttagaatcgcgcaattgtagtagtataaatatgtaatacattaaatgatgatgtgtaacaataacttgctttgtttcttttaattttttgttaatttttttatattttacttcctgcaaattcatttcaatcttggtggaagtaggtaacaggtaatttaccttagttgaaagattttataactagacgcaatccttttttacatcatgaaattacgcaagacatttaataaaatgaatatttactgggtgaaaaaaattcaagagagcagtaatcaagtgttatcttaacacaatgctgaatattattggttttttttagtattcttaaataaaaaaagtgatattttgctaataacacagatattgcaaaaaatgcaatacaaaaagtaatatagaaatattaattttaattttcatacaaatgtttttattttaatttttttgcttagttttgtaataattttacataggcaatgcctatgttaaattaatttatatttatactttctcatttgtttaaacgttatcaaaaaggggggaatatggagaaacttcattaatatatacaagaattagcaacatgcatctatttaattcgattagtaaatttgttccaagaatagtgaagctttataactgacactcattcttttgtttgtattagtaattttataggttatataatatgacaaaacatctacaaagcaacatggcccacttctttattaataatatcaacaaaaaattatattattatcatgaaattaattacagtacacttttacaatacgacttttatttgtcttaaacaaatatataattattgaagaatacaaaaattatgatttttttgctatatattaatatgtatatatatttgtgctaatttatgtaccattaagttaaaatttagtcttgtgtcttattgcttctttgatattgtaggctaaaatcggcttactgaaagctctttgctaaaagtaaggcaaacatttttaatgacatttagttaaatgagagctgaagtaaacatatataagtggaatagaatactcttttaaaatagcttaattgagatatctctttatcagtttgtttttagtctattcttaattaatagctatttgaatatacatatttaatacggtcagacaaagaaggaactacaatcatagaagtatgctggcgttagtagtattaccattgatggccactgctagttacttatctaaaagagaagatgcaaaatatcagaaaatgatgaaggaagctaaaagcaaaacaattccttctacaaaggcaaatgatctctttggtgtcgttgttccttctgttagtaagcataaggatgtggaaacaaatgaacatggtttatcagttttgttaaacactaaactagaaaaacttgtagctgcgtcaggacaatataatggatcatctcgtttttctgctaatagcttaacctctaaaatattcaaagatgttgattgtgacatgaatttaacaccatattcaaaacttgcactgatgacagggataggtatagatgtgaaatatccaatcatattggaagaacataatgaagaaataaattctttaaaaaataaggttagcccagacaagaaatttaaattgctgccatcaatagctgagttttcaaacttattaccacccctgttatcaaaactacaattaatcgaaaattgtcatcaatttgaaaaatatacaagtactgatcctgttttattgaattcatttatccatcaacatttaaatgaaataatttggatgggaatatattattctatgaactacactaatttcatttcatcatatcccattgatgcgggatgatattatgccattttatggtattgcccattctttactaccagtttcattagtgtacttaatttcacattatttatatatatatgcatatacatatgcacgttgtttaaaaatatgtaattgtctttattaattttcctttgatggttgttttgctaaataaaagattgttaatttgtcaactatttgtatacaaaagttataatataactaatcaaaaaaataatggggaaagggacacaagtctgaaggataatcgtgttttaatcgattgaaaagaacaattatattcattaaaaaattatattaaaatgatgtactacaattgaagaagatagagaagaaataagtcacacgaaaagatgtatacgttatgaaattttgtagtattgataatcatagaaaaatgtcacaaatagtgaatgctgacataataatttattgtatttaaatttattctgctaaaaatatatggataaacattcttatgtaaagatgggggatatgaacagtttgtaatataataatgtttattcactagtgggtctaaataggaaacatttatttataatatacgcgtggttaatattagtatattagtttccttaattacttataattatgtatatatactattcttagcttataactattagatatataaagatgatgttattgatgaatagctttgaccagtttaacatcaaaaaccaaatcagcagctggtggtataacacctggaataccattagcaccatatgcaagattgctagggatttttaaagtacgttcttcaccaacacacatcccgacaataccttcatcccaacctttaatgaccataccacttcctaatttaaatgaaataggtttgcctctgtcgtaactagaatcaaattttttatcattttctaatagtttaccagtgtaatgaacttgaactgcatcgccaactaatgctttattggtgcatttatcaacgggaattctctttgtaatatcaatttctaattcttttaatgttccagctacggaaacacctactaaagaagatatgaaacagattagactaaacttcatctcaatattgaaatagaatgtatatgaaataaaattatttaacgtactgaacttaaccctgtggttgtagtgtgcatcctgtaacttggtattttgctaaactagcaacgatagcttggtggtcgtaagtgcaaagctaaggggtgttagaacttgttctcttttttatatcatactttttttttctgatttattatttttcacattttcgatcaccttttttctttgcgcgtaaaatttctataattcagtattctattttgttataacttacatatagagattaatataaatatagatatgtatatatagataagcaaatctataattcatcgtgtgctactggtttatcatctgggtgattatctgaggtagattcggccttctttacgatagtttcttgagatttgacagttttttgctcattagaatcaaaaagagaattcaattttggctcttgttcctcctcatctatatcaatatctacattttcagctgggtaagtcttaaaatatagcttaagcccatctgcatggtgagtaccattgtttttcaaaaatttcataagttttattggtgtttttggtccagataatgtaattggaacagtgtcgttacccgaagggtataaaataattgttggataagaatatatggcaaatgatgcaatatcattagcttgcatattgatatccgcaaataaaactttagactttaatttttcatcagatgcaaatacatcagctactttatggaaattatcattacctttcttgttacggatatcaaatggtgcatagtatctgacaataacgtctttactgttgttcaatacaatatcatcatgggtttttgctactagtttaaaaacattagaattctgttcagttgggatttcttcagattttattattggttcagcgacgccattaataaaatcttctactaatattgccacttcagtttgatttaagattggtagacttgttattaatttatattcttctgcaggcatctgtttaataccgtattttctgttattaatcatatcatggataccaaacaatgggaactgttccctcatgttcaaatatttaacatggctgtgataaactttggcatctagaccaataaaattaatcttacctctatatttttggcctaactgagtgaaaaatggtgtcaattcctctaattctttgtttgttaaatagaaataatagcctagtggtaacttagaatcgatataatttttaaaagtctctggttcgacatcagcaaatggtggtaatatagagtattgtaaccaacttttaaattcagaggaatcttccactattgcggttaaattaccctcgaatacaattggttctcctctagatgtaacgttagcaggattgaatggtttatacaacccaactttgtagggtaaaaatgtgttgttatcatgagtattggtgttattattcattgaatccactctataattgacaaagatatgggaattaaacaattggttagctaagtatgatactgtttcgttaagttcatagagcccgttattgactacaacatattcatcggaaatatctggatcaattaaaatttgattcaattcatctctattgttagctgtaagtatactacattcatcctgagccagcatgtaagagaccaacccatcgacagacttatctttctccacgtccattgagtgtactaaacggtgatttttaaagactctcaaagttgggaaatatgtaacttttaactcagaacagatataatcatcttcctcacaattaatttgaataacttcgatgccacgaggttttaatattgtggccacctgttctaaatcaggtaataacattttagagtgagggcagttggggactgtgaattcagccaggattaaatctttagaggtaatgcattcagcaaatgtatcagtagtaatcttggtgatgtttgtattattttcgtcaattagcgcagcatattgacccaaaacattagtccatagaagagatatccagataataaatagtgaagccatatttttagaaagccagtgaggcagctatttgagtagtaacaaaaaaaaaaaactgagtaagagtcgaatagagatacctttataatttgcgcgttggtttatttgtatatttttaagtataaattaatagcaaagtaatttatatatgtaattaataggcacatattaattaggacgggtgtacttcaatgtaaacgagtattacatttaatgcgtatttgaaaagtttcatttcattaaaagaagtcgaacgtttagagatggaaaagaaaaaaaagaaaaagaaaaagaaaacagatttggaaaaattatataatatgtcaaatagaaatatatacgagggaaaaaaagaagagtagaaggtggttcaaaggaacagactggtgaaaacaatatgatagaataatacttacaatactaaaaaatgcttacatatacgtacatatgtatatatgttacattatatcatattatattatatttaatgtgggattatgggcggtggaggaatagatgaggtgttctcattgttttgagacgttcttggatccttaccttcattgaaatagtcattcatatctgcagttgtagtagaatgagtatgcttcttcttcttatttgttctggaagttgttgatgttggtgatggtagaggtgcagcagatgcagtattgatagtattaggtataaaagtttgatcattattcatattagttggattagtgatagacacaccagtgtttagtgttgtggttgtggttatgttgctgttaatttgttcgaaattctttgtcgtggggatcctgtgtaaaaacccataaccgatattacaacccaatctaccatcgggaccaatattaacagtgactggtctaactgaatcagagaccttgttgtagatgtacaagaccaaggattggttggctcttgacctgactacatcagctaacagttcatttccaccagtagctaataaaccatcttggcagccaataatatagtcctcgtccgggatcaaaccagccacttgtgctggtccgttgtcaatgttcaattgtaagatatggtaagtgaaagtggctgcaatcaatggagtccactgaactttaaacccaagggatttgaatagtataggaacggtgattccggtagacgatgagtacagttgttgttgttgttgttgttgatgctgttgtgatgtagaatttggatcctgatcattatctatagaaggtttaatatccaaagagattgagtccatatcattttcgtctctctgggccaaattaatatattcatctctgaacctaccacctttagcagaccagatattcaacttgacgaacccggtcccgattgaatcgttgataaggttcaatatggcgttataatctggatacatgaatccgtagttgttgatatacatgggtaatgggaaatcgttgacaccgacaatatagtcgaaaaaggattgtagctgtagttgccattcttcgacgtaaaggattctcagacctgatatgagttcgtttgcgttgttgggtagggtgaagtcgttgtttgaatcttggttgaattgtgatgcgattagatttggtgggatagactggaagaacacgtctagtttgttgttgtttcttgcaacggtgtctgacacggtttgttcaagggttttaaccagatttttagcaattctgaacatgatagataatgttgagtgacagaagggggaggaagtaaattaaagtatatctctttgttatttgttatttgtgtgtgtgtgtgtgtgtgttttcttttcctttttcttctttggttcttttctggttctttgctgttctttattcctcgatattttgaattctttattaaaatatgattagttattgaacacaaaacaaatattttaataataataataataataataagtattattattattattatttttcaaattgagatatagagagagaatccaaaaaaaaaaaaaaagaaaaagaaaagaaaagaaaaaagaggaaataaaaacgtcgtacaaagagaaacaaaatagtaagtagttaaaaaaaaaaagaaagatactaagatgttagtgccagaggaagttattgaaatgtcaacatatacacgtgtaagcagatatataactacaatatttcaagagatataaaacaaagatggtgaaatggaaggggttgtacagttctcagtctagtttgttaatattgacaactgaaaagagatattagaattttttttctgaagagaggaaaacatttcgatctgttttttccgaccttccaatctttcgagagttcattagaggatattaagatctacttatcgtctctggtgtaaccctttgcgtacatgaacaaatgaataggtagataaataaatatgaacgtatacgcacacgcacatatatatgcatatatatatatatatatataagcagtatcttttcttttcttgttaccttctcttatatatatattatatatatatcttgcatgtgtttttcccaaattgaaatagaagaaagtttaatattgcagttggcaatgttgtttgttgttgttattattattaaatcgagtagtaaaggacaacgaatagaataagctgtaacaataacgtaattagaatgattgattattgttaggcaaactgctatttgttttaagttaatcatctgattcaaagaaagaaaaaaagaaaaaaaagaattctcggcgggtcaaggggaagaagaaaaagaaagtggggtgattctagtttttctgtgtagttgaaattagtcatactagacgagaaggtcctttgtctgttgaaaattcacaaggcaacaaacagtgagaacattttttttgcattagaagagggtaagaggcccagaacaagagaaagagaaagagaaagagagagtgtgtgtgtgtatgtgtgtgtatttgtgtctgtaggaggagggggaggaagtaaataaacagctgttcttgtcgctaataacgaggaaaatgtgggcggtaaacgactgttttagatctggccctttttcttacttttctactcttttcttcagtttcccgcctcgttttcgcccccttatcttttctctcccctttctttttgacaatgccaagggggagggggagcaagggggggggttagaataaaaataaggggaagcagggggtacgttgaaccaacatccacacaccccacctatgtattctctatatctgtaggaaacgtgtgtgacacccacacacccacaccagcttgatctccatcacatgtttctttttgctttttcctttgcttctcgctccgctcttcactctccgctcttcgctctcctcccccccttccccttgttaaactgcaagttggtagtagtagtggcaaatcgtaacaaacaagaaacaacgacaacaacgacagcggcagtaaatgagaaaagaatgcgagaagcgtgacttaacaaagttggcgttctacagaatttcatcccgtttttatttttttttttctttctttctttttttacttttatttttggtcaaaagcacaccttcatgggcggttaattcatttgttctgtaatacatatgtatatatatatatatatacatatgtgtgtgtgttcgtacgtacgcatatatatattttctccttgctcggcttcctttagtactcttcgatcgatttcttgcttgtccgtgtgaccttttcgtttctcttacatatccacacaaaacaacaacaacaacagtaacaacaacaagactaatattattaattgataatatttcttataatatctatagcattataattcatagcattattgcatattactgcattttatacataaaaagaaaagaaaatacagagaaagcataaataaaataaaataaaataaaatgtcgtttgatcaattacataaggcaactgaaaagacactattggaagaagtagaccagatatgtcaacaatttgtggtcacccctgaaaaattagacgaattgaccgcttattttatcgaacagatggaattgggtttgaactctacagatgctgatagtgcagacaataaaggtttgcccatgataccaactttcgtcacaggtaaaccaaacggtacagagagtggtgttctcttagccgctgatctgggtggttcccatttcagagtctgttccgtcactttgaatggggaccacacctaccatatcgaacaattgaaatcaaagatcccagaagaattactagaagaaacaggtgtcacatgtgatgaccttttcggttatttggcaagacgtacaaaggcctttttaacacgtaatcatcctgaacttttgaaaccaaacccagagacaggaaaaatcggctctttgaaaatgggtttcactttctcttaccctatagcacaaacctctttaaactctggtaaattgatcagatggaccaaagggttcaacatcccagatgctgtcggtaaagacgttgttgaattgtatcaggaacaattgttgaactatgggttggacatgatcaacgtcgttgctttgactaatgacaccacaggtactttcttgtcccactgttatacatgtggtggtttgaataattccggtgaaatctctgaacccgtcatcggctgtatcttcggtagtggtactaacggttgttacatggaaaatatcgagaatatccacaaactgccaaaggatctaagagaccatttgttggcccaaggcaagacaaagatgtgtatcaacactgaatgggggtcctttgacaacgaattgaaacacttgccaaacactaagtgggatcaacaaatcgatcaagaattctctccaaacccaggattccatctgttcgaaaaaagagtatctggtatgtaccttggtgaaatcttaagaacaatcttggtagatctacattccaagaaacttctattgcaacaatatagaacccacgatcaattgccacaccgtttaaagacaccattccagctacaaagtgaagtactagcacgtatcgaaattgatgattcctccactctacgtgaaactgaattatccttcttacaaagcttgagactaccgaccactttggctgaaagaaaggctatccaaaatttggttagagccataactagaagatctgcctacttagcctctgtaccaattgctgcaattctaattaagactaacgccttggaacaaagataccatggtgaagtcgagattggttgtgatggttctgttattgaatactacccaggtttcagatctatgttaagacatgctttagctttatccccacttggtcatgaaggtgaaagaaagattcatttgagaattgctaaagatggttccggtgttggtgcagcattgtgtgcattagtagcatgaataagggagaaaagagaatagaatgttattcatctatttatctatctatctctacctgtttgcatgtttatgtatcatttatctgtctcttttttgattctatctttgtttttttttacactttagtcgcttattgttatttttactatctttttttttttaatttcctttttctctcttttggaagttgatgcttatttacctatatattgttatgtacaaattaatatacaatatttatgacttacgagttttaatgaataattatatgtttaaaaattttttttttttacattgtttcaacaaatatacatatgtatatgaatgtgtgtgttatatgtatttgtttgtgtatgtttgagtttgataacaagaatgtaattgcttttcttttaaatgaagaagttttgtataagtcttatttttcctattgcatattagcgacttttttatctagattggaaatatacgagtagagttactcatatatagagatttcctattctcaatgaatgaactttgtatgatatatcgcatttattgtgtattgttgtgttatatatatttctgattagaggaacgactcattccagtaatcttggatctgctttgagttttctaaccccaaaatctcatttaataaaaaaacaaataacaaaaaaactttttgttcactcgtaataccccttttattttcttgaaatagagaatattcattaaataaatttaatatttgtcaatgctttgtaattatgtgttttctatggactaacttttgaaatgttcttgtttcacttttttttttttttgcgtttttatctttttgttttttgacttggaaagttcttaaaactgtaaaagtcttaacaaaacgataaagacacaagaaaaaggaaccacacctatgaaaaaaacacttgtatctcaagggaaagtaacttaaattatcacttttaattacttgacactttttactttttaatgttttaagaccatcctgacaaaacaatcatagtatatattattaatcaaaatatctttaaattcccatgttttctgtataccttagttaagaaaatagtatgaaataagattcgaatacatattgatttactaaaatgatacaaggagtggaaataattaatttgttaaagaaacaaaaaatgcatggtagagtttattaaatctaacaaaaaaagtgttgaaatagaatgttctatgataaaatagatagaacaataagattttagcagacaataaacgataaattgttgagtaatagttgttgagaggtcaccaaaagttgttgagtttatttattaaatatcttactgttcgtagaggaaaatggctgaatgttaacatatataaagccaaggatttcatcatacattatttttatcttatttacaatctttctatattattatttctatgttgtatatagagaaagaaagtgaagaactttattataattttgtatactaaatctgtttaatataatattgagaatgtttactatatatccaatgaataaaggcgctcattcccaacaaaaagatttacacttatttaatgttatattgtatcttaatatattttaatatgctttcaaaatttgtttttttttttttttttttttttttttttttttttcagttgttttttttttgtaatttactatataatctcaattgaaacttttaaactttccaaatgatatatcaaagaaataaataaataaataaagaatttggaattagatattcctaatgatattttcaaatcaaatagctgaaaaaaaaaaaaaatacactaataagaaaaaatagaaaaaataaagaaaataaaatactttgaatgcaacccaaaggcatggctaaattaattattcctttctacatactattttcttaataatcattattttatgcataaaagaaatttaactgaactgtatccatctaataaaatagagtcaaacctccctatttgatttttctaaaacgagctacttcatcgatgaaaaaaattatatagactacaatttactgttagaagaatatttcaccctctatcataaagatccaagagcaaaaaaataaaaaaaacaaatattgtaacattcctatgtaaaattagaaatatataaataagccaagttactcatataattttaatctacttcttcaaatatttccagactttcacattttctgaaaggaaagtcaagatataaaattcttttattacagttaacagatataaactttaatatgcttaacatcactctcataatagtctataattcatacaccccaagataaagaagatatatataacagacaatattacctagacgatatttattgacactatttatatacaatctattgatcaacacatgatcattatattcttagagtttctttattttacataaaagtaatactaagaaaaaggactacagacaagataccttcctacaaagaaacggttaacaaatgttaataagaaaacatactgctttgataaagaaatctgataactgttgttactaatgattgctaattacgtttctggaaatccaaagcaaaagataacagagaaaaatagataaaacagagaatagatatgtggagaataatccgatcatagcactgatagacattttcaaaataaatattgaaaagtcttcttcctctaacgatatcacaaacctttacataccaaatgtgaacagtggagttatatttccgcaccagatagaccaaagtttattttaatccactttaatcttaatgtccgattatcgaccgatatttaaagaaaaagaaaataaacggaagtatacctccgtccactgaaatttttcttgccttacaaaatattatgacaatatcactttgacctttctattgttaaccataaattatcattgccgctttatgtcttgattaggcagttgacataaaaaaagttgctaattcgacattatttttcttgtgctcaggtgggggctaagtccaagaaaccctctgaacaaattttttttaaaaaaatctgcaaaaccctagtaccaaaatacaatattaaatcttatcatggcaataaaccctactgcgatatagctacaatgattatatgtgttacaaaagcatcactatttgtatacttcgcagtcttttcacgcatattactactatatatgcagtgtgtatttttttgtattctcaaatatgatcaacatattatttgtataaagaagacgtcaaaaataaaaaaaactttcctttatattttttaaccacataataaccctaactaaacaacctatcatacatcaaaaattcagtaaaacagaaatttaaccctaaaataaattttatataataaaaagactaatcttattcatgcgatgtccaaaaacatatatacaatttgatccctcaaaaaaaaaaaaagatggaagatgaaaacaattgttttttgctcgagaatttctaataaggctcattttatcgtttttgtctcgaaacatcccatcaataaaaaagctagcgagaaaaatgaatagaagttttttttctactctattatcaacctttttaatatttatataaaactgtcgacaaggttagtattatctgagaaaagaaagtgataacacatagagagaaattcagcaatgaaattaatcaatcaaattgcatgatcccttattcagacatttacataatttcattttgttaataaaaaaagaataaaattcaatccgggacaatacttttttttctgtttttttttttttcattatcatttttatatataagtatatatttgcttacatatgcatatacttgttatcgctcgattattaaattagagtgaaacatcttcctcttataataatatgcaacatcctattaagacaaaagtaaaataacttgtacgaaaaaatatgtcatttgatgacaaacaaattatcagtgattctaagaccggatcaggagtacgactaaataagtttttggaatctacttctagtgatgatgtcgaaaattttgatttagaagattcaaatataattttacataaaaagaattctgcaaaagcagatagatattatgtatgttctacgacaaattcttcaataaatgaaatagatcctagtaataaaaatggcagcctgacaaataaagccaataatattttcacaaaatttattgattcctttagagaagccgagtcctctgataaccaagacccagatgatatagaaaaaattgaccaagatgatatagtttctgcagatgataaaaatatgaaaaaaactatcaaaaagagacatgtcttattgatctctttagggacaggtattggtactggtcttcttgttggtaatgctcaagccttacataatgcaggtcctgcagggttagttattgggtttgcaatcatgggtacctgtctttattgtattattcaagcatgtggtgaaatggctgtttgttatagttccctaccaagtaatttcaatatttatcccactttcctagtagaaccggcatttgggtttgcggtggcgtgggtttattgtttgcaatggctttgtgtctgtccactggaattggtgacagcctctatgacaataaaatattggacaacaaaggttaacccagatatatttgttttaatattttatattttaatcattggtattaacacttttggggctagaggttatgcagaagcagaatttttctttaatagttgtaaagtcttaatgattactgggtttttcatcttgggtatcattattacatgtggtggtgccggtaatgatggttacattggggccaagtattggcataacccaggtgcatttagaggcgatcgtcctattgatcatttcaaaggaattatggctacttttgttaatgctgcgtttgcattcggtgcatcagagtttatttcaattactgcaagtgaacaagaaaatccaagaaaggccattccaaaggccgctaaaataatgatatatagaattctatttgtattcttagcttctattactttaattgggtttttggttccatataattctccacaattaatggggtctagtggatcagctacaaaagcgtctccatatgttattgccgttgcatctcatggtgtcagagtggtgccacattttatcaatgctgttattctattagctgttttgtctgttggaaattctgcattttattccagttctcgtattttgtactctttatctcaaaagggattagctccaaaattctttgaatacatcgatagagaaggtagacctgcaagggctatgggttgctcagcattatttggtattattgcattctgtgctgcctcttccaaggaggagcaagtatttacctggttattggcaatatctgggttatctcagttattcacttggattgcaatctgtgtatcacatttaaggtttagaagagcgatgaaaattcaacataggtcattgggtgaagttggttttaagtctcaagtaggtgtgtatggatctgcatatgccgctgttatgatgacattggccttagtagctcaattttgggttgccattaaaccaattggtgaagatcacttagatgctcaagcattctttgagaattatttggctatgccaattttaatcgctctttatttaggttacaaagtttggaaaagagaatggagactttacattcctgcagaccaaatcgatttggtgtcacatcgtagaatttttgatgaagaagttctgaaacaagaagaacttgaagaaaaagaaaggttgaaaatgtccccattttgggttaaagttaaagaatttttcttttaatgtgactgtacatcctgatattttttccttccttcatccttctatatttttttattaccaaccctgtcatttaataaaagtctctttccacctttcttccttctttttcaaataatcaatattcttattctaattaatatgtattttcatactttattgtattttttagtcactttcttcactagtatgcattctctaaacttacttatatatacatatatatgggtatattttttatcaaaataaacataaaatgatcccaaagaattatctgtactaatcttgactgataataaagctatatagatatgaatatattaactaatgataatagcagaaatgagaaacttttacatatatacaaaaacttgtgataatcaaaattgcatattctgctattctaactatttatcttacctttcctgtcttctcttttattccttttttttcgtctttatttagaatttcttatgatctctccttccatatagtatctgaactacctttaagttctttatttcgttccaattcagctttataccattcttgaactttaataggttctgatccatgtagcagacaaaaattcaattttgccaactgtctttggcaaggattgaattgtccatatctatagtaatttctaaactgacctccaatagaatagcatattgttaattgatcaaatgcctctctacagctcatagtagttggatattttgattgtgacatagtttatttcttcgtgcttgaatacaggtaaatagtactgaatttgatgatttgtatatgttatataaaaacagaacttcccttactttagtttattttttatgactaaattacctaaacaaatctttaaaacacaattatcaggtataggataaatattatttaaattacagtgtgttttttctttttattgctcttgccactacaataactattattaagaaaagctatagtaacgatgtatatttctgactatttttattcctttagaacttgtcaatgaatgataaaaaatcgttacagtatattagttgaaaaactcatgagatataagttctgcaccgggttggttaaaaagttctcatgaaaaaatcaaaagaaataggtatacacagtggaataggaacatacactaaggacacatttatatatctagaactgacacgtgctgttatcaaatgaagttacaatacgtagccatattagtcccctgtctgtttattctatttgctctatacttcatctttgaaaaagataaatatgataacattattgtcacggaagatacgttgcgtactatccaaaatctaatagaaaaaaatcctatttttattgcttccaaatcttactgtccctacggtaggcaagcgtatatcacattaacccataattatagggttcctaaggataaaataaagataatttatttagatgaattgaaatatggtgcagaattacaaaagggtttatatcaaataaatggtcaatccactgtcccacatatttatataaatcatagatttattggtggtaatgataagttacaagaattaaaaaataaggatcaattaagtgacctgctcaaaaatgcattgaaatgacttctacatatatatatatgtacgtatttatatgtatgtattattcaaataataacacatggttattttcattgttaaatcatccatgataaatattttgataccccagtgatgcaatactttgaactttttctagaaatctgtaaacacattactctttgaaacaatagtactctcaaaagcttgcttagcatcagaaaaccattgtgatccaccaaattctgtttgtggaaccagatctttcttttttttactggtaacattcttaggattattattatttttattgtcgttactattaccgtatttcaaggtcaatgaataggacattggtataatcttatcctcttgttttgatctttccaatatttgttttatttttttctgaaaagtggaaatatcatccaaggaacattgtactctagtattgacatcgcagagatgtaacagtaaccttaacgtataataagcatcattaccagcattatgtaaaaaagcatgtggcaactgaaacaaccttaatatcttgccaagactagacccttccttaccataacaagcagaatatatcttatgcgtatctatcaccaaagtagtacgagagcttgaattacaatcaacctgtgagatatgagatacaggtttagtgtctggtagaatcacacccattgatttcaaccatttaaaatcgccttcaatgttatgtccaacaaaagctctttcccacgaatcagatatattgttatcagggatcatgtaaaaattgatcaaattttgtatgaaatttacacattgtcttaatgaaagcactaaactttcaccgagcagataacattctttcatatcaagtacccaatttttattaattaatgacagtgattcagatacgataagatgataatttctaaaaatcggattaagagaatgcaaattttctcttggatcgtatatagatattccaatctccgttatgatattattatctctttcaaacgcttcaatatcaaatgaaaaacagattgtgtttctttgagatattaattttattgaatttgtcaaataatcccattgtgtcgaattctctttaggagaacaatacactgtagggtaatgttcccttttaatatttgaaagactaataagatattgtttatctaaaggcgattgattatcagatttagtcaactttttaatttcaatattattattattattatctatcatttgagacaattcatggtctgaatgttcttctttccatttattattaaattgaacaattttgtcattcaacattgaattagatttcttattcaatttaagataataatctttaattttttcgatatataaattaatatactgtgacaaggtactagacccttcatatttaataaattttaaatttttaaaatgatcaaaatcatttaaccaggattgttttgtaagtctcttattatcgaaatcaggcgattgaatatatttatttataatagtctggctccttttatatggttgaaccccatatgttatgtcctttggcaaattccttacatgtaagatattaggcaacttcttcgtttgataatgtttctgtttattaataacatatttgttaaccacacttttcctattatatttatgcataatcttggaaataggagtttttttttttcaaacagtacttaaaaaaaaagacctgtttatggtgatagtgacaaaatgatttagtagttttaggattgattgtatttctaactgttttagaatatatatgaaggttataatgctgaaagaaagaatttgtagtttcttttagaaattttagtatattaattacccataacgcactgtacatccgtacaccgcatactgtgagtggtggatgaaagtaattacaatgaataaagatgtttctttcggagaaagtttttgaatagctatattctacaattgtatactatcaatttacttattccctgaatatgattgtgttataaagaactcaagtcttattgacaattacaggaaaggtggatgggatacaggaataaaactaaataaagaggactgctctctatattattaatgttatttcaattgaatgataaatacaacaacagcaacagcaacaatctttgacgcacccattgaaatctaaccagaccccagcacaaaaggaacgattgttataaccatatccttatcaatgcatcaatatacatagcatgtcctatatattttttgtatacaaatgtgttctacttttaatatgaatgatcaatccgaaaacgtttggcgggattaagaaacaaatcccgcagccggaattgttcgagattaccctgccatggaggtgtatgggtgtaattctgatcggatttccattttctttttttctttttctttttctttttttatttattctttccttctctcgatttttcccctttccatcgccaagtttgaacaattttactcatttgcaaatcgaaacttttgtagtggtgatatgacatttctatgccattaatacaaacgacttactctatcttctgtttgtaaaccagttgtttgaaattgtgatcgatggctattttgtgatgtttaaagatctgatacaaatacatttcgtctaaaacttattttttccctctttgttccctgttctcttagctacttttttttaagctcgttcaagtgaacaatccctctctatccaccatatttactctatccacacattcatacatataataacaacaaatgtctgagtcacctgaacaaaatactgaagttaaaccagaaactaatgctgtttctccagaagtcaaatctgaaactcacatcaacttgaaagtctcagatggtcaatccgaaattttcttcaagattaaaagaaccaccccattgaaaagattgatggaggcatttgcaaagagacaaggtaaagaaatggattctttgagattcctgtatgatggtgtcagaattcaagctgatcaaacccctgccatgcttgatatggaagataatgacctaattgaagctcatagagaacaaattggtggtttcgctgcaatggaataaatttatataaatatatatatttatttatttatacatatttacaactagttgaacaaataaaaaaaaataaattatttgctaatgactacatgttaactttgtaagcattttactctcgcattaccataactagaagtatatctattcacacttgcatacatatatacctatatatccaccttctagcatacttaatgcttaaacaaaaagcaagcccaacaacttgtctaatagcactcctttaagctgttccaatgtttgatttattgttcgtaaactccaaaggtagtcttttcttatttctgatttgtttccttcttgcgaatgatttgtcactttcctattttgaccaatatatccatatatggtaatttaatgaaaaacgcgtaagacctttaattttttggtttttttcagctttttttcttttcgaagaagaactaaaaaaaattttttgacgtattttacgcgtttctcgagaatttttctcttacatcttcaccttctttttttgatggttagatcgataaaaaaaaaaaagagggaaagatgtatcgacacaagataataactacaaagatctaatttccatcaataaagaccattcgttattctaatcaataatcggaaccatatctatcctttaaataattactctaataaggattaagtccattcattttattttttatttttttttctgtgttttctatctcaagtaaaataaaaatacattaaactattctataatataatctcactcgttcgataaaactcaagcagatagcatcggataataatataaagagaagtataacaaaattgaaaaaatcaccaattatgctctctaataaagcagcaccaacgattaaaggggatcagatcgggtcatggaaattaggagagactttaggttttggaagcactggtaaagttcaattggcatacaataaaaacttgaataaacatgcagctatcaaaattatatctaaagcgatctttaaatcccaggctctaacagatagcagtaataataacagtaataacggtaaagagagttattttgcccagagtagtactcctgattctttaccttatggaatcgaacgtgaaattatcattatgaagttattgaaccatccaaatgttttaagattgtatgatgtttgggagactaatagtaatctttatatggttttagaatacgcagaaaaaggtgaattgtttaatttattggtagaacgcggtccattacctgaaaatgaagctatcagattttttagacaaattattatcggaatatcgtactgccacgcattaggtatagttcacagagatcttaaacccgaaaatttgttgctggataataagtacaatattaagattgcggattttggcatggctgcattagaaactgaagataaattattagaaacatcttgtggttcgcctcattatgcagcacctgaaatcgtttcaggtatcccataccatggttttgccagtgatgtttggtcttgcggtgtcatattatttgctttactaactggtagattaccttttgatgaagaagatggaaatattagaaatctgctattaaaagtacaaagtggtcgttttgaaatgccagacaatgatgaaatctctaatgaagcacaagatttgatcggtaagatacttgttgtggaccccaagaaaagaattagtgcccgcgatatactaaaacatcctttattacaaaaatatccatccattaaggattctaagagtattagaaatttacctcgtgaagatacatatttacacccattagcagagacaaattctatagtagatgaaaacattttacaaaatttaattgttttatggcatggtagaaacggggatgagattaaagcaaaattgactgagccaggtgcaaatgcagaaaaaacactctacgctctcttatatagatttaaaatggatgcagaacaagaaaacttaaagaatgaacatataagaaaaagacaatcagtaacgtcaccaagcattgccaataatcaaaattctcaaaataatagtagtttcaacaacagaagtccaaataaaaatatgtctactccacaaagaaggaaaaatagagcatcaatgatcagtgttggatcatcacataaaagacctatttcatacatcaaagtaccctcgggcacaagcctgtcttctgtaaatcttgtatcatcttcttctgctaaccgtggaaagaatcattcaaagagattatctaaaatgtccacttccaataatgaatcacctaccccagcttcaagaaatagaagactttccaaaattaaatctgacagatattcaataatagtgaatagtaatactaataatagatcacagcacaagaatggaaagaagaccgccaggaatagtaaaagaatatcaatgctaccaaatatgaaacgtgggtctatcaccacaaaattacttgctacttatacaaaactttctgaagacgacgagtgggaatatattgaacaggagacaaagagaacaagctctgattttgccacacttatcgatgaaatctttgaacatgagaaatatgaacaactacgaaaagaaaaggaggagctagctaaaaaagttagagaagctaaagaacgtgaagaagctgaaagaaaaagacaggaagaggaaaaaagactaaaacaacttgaattagaagctcaagagaaagcaaaagcagatcaaaaaaggcagatggaagaagaaataggtaatttaaagaaagaattagaaaatttaaaggctcaagagaataatgcagacttcagatctgtttctgctccacttgattcaaaagaaagcaatacaaagaataatgatgactttaatatagatgatattttacgtcaacgtgatttttctttgcaaacaagacctgtatccaggttggatcctgggttattctttgaatcatcagaaccattatcatctgttagtgataacgcatattcaagcggaagagtgcaacttagacaagaggatattagtgaaaaactgaagacagaaaaaatgattctggagacaatcaggaggtctaaatttttgggttccacctttgatattaatcgtgaattaagaactgctagtactaaacttcaacgcccacctactgtgcaaccaccagtgttaccttcagctagacctcctttggtagatattcaggaaaatgaaccattacctggaaatgctgttgctattgctccattacgatcatatgatgatcaaagagaagtaagaaaaatttctgacattaagattcctcaatttacgaggaagtcaagacatttcagtgaatctaataaaagactatctgtattatccttatattccacaaaacaatcctatacaaatcttgcagatattgtgaagaacggcgattataatgctgagactataaataagggcaagaattatggttatttggtgaataatcaagaagattcagaatttaattttgaatctattattgatgatgagaatagcaaggaaagtgctgacaataaattatatgaagttgatgagttacctgaactatccgaaaagaaaaaagctttaaagttaaatttagcagatagatatagtcaaaaagagaaaacaccactctctgaaccagaagaagagtcagaaaagattgaattgccagttttgcctccattagattccaagaatgctggattgggtatttatcaagagattgaagaggttaagaaaattgacgttcaagaagaagaagacaacaatgagttaacaaaagagaaaaccatatcatccaagaataacgacgaaagggttgaagaaaaattaagggaagaaaatattagagatgcacccaaaccatcctctaaggaatctacaacattaactgaacaggataaaaatgaaaaaattaatgttcctaaacaaagaaattctaagatgacagaacaaaaaccaagacaagactctcaaggtgccactaatttctttagaaaattgtccggtggtataagtcaaactaataatgttaaatcatctaatggtagtgggcttgttacattgaataccacagtctcagcaaaccaattatatcagggtttatataatcttttaagaggatgggcaacatacggtatcaaaggtcttaaaggcaacagtgaaactagagtaattactggtaaattatctagtgataatattctttcgttaaggtctacagtgtttaggatttctattactgggaatggtaaacatagtcgggttcaaatcgagaagaaatctggttcatccaaagctgttagacgattaatcggagaaattgaaaatattttaacgaaggaaggtgttttacaaaagtaatattagtctatacaaggaaagaattattataatcgtccatatttattcttttccatcttcaattctcctgtttcatttaatatctattttacacaatcaaaatatattatattgatagacattttttttatttttcattctttagcacaaaatagaagaagaagtaactaatgaattagcaattatttgtatttttggagctttaataacaagaatacgcatttcgatatatggacatatacgtatcattttctattgaggacactttatttttactattattgtaaatatatcaataaaaatacctatacaaatgtatatttgtttgtttctattattgttgtaacatttataaattaatttttttttattttgatttggattttatagtttctaaatgattatttgttggataaaatccccaagaatattggacgggttgtgtaatttgtatatctaattgattagcaaaatctgttactagagcaggattctttaagaattgagacccaataacaataaggtcttgttttccactttgaagaattgtctctgcttctcttgccgatgaaattcttgatggtgaacatattattgcggataagccgttctccttcaaactgtgccttaccttttccaaaaatcttgttttgccttgatatcgaggaatctttaaatcaccgggattaacacatacaaaatccaagacatcaataccatgcttcacgagttcaatacatatttggactgtatcttcttgtgttaaacaatacttagattcagatttatcacaatcaggtaacctaatgaaaataggggtatcagaagaaattttattacgtatctcatcgatcacttttaataaaaaactcattcttcctttcagattttcattatacgaatctgatctcttattccacagtggagataaaaactgttgaaatatatagccgtgactggcttgaatctcaataaaatcatatttggatatatgaattgctctttgacatacatccccccaatttttaatcatttgatcaatgtcatcagtagttaaagtgttcaccaaaaaaggaggctccaatgtattagaggtcgtgttgttattaatgaaatgacctaattgaataccaattttactattttgggaatgtacaaattctactattttactataatgatcagacgctaattgatcattccaaagacctaaatcattaaaagaaaatttcccatcttcacagatggaagtatactctgcaataatcagacccggccctctcatagctagggaaccataatgaacagtatgaaaaacagttggggatgcatcaatggaagagtaagtacacatcggtgacactgttattctattggggatagtcatggatctaattttcatcggtgtgaacaacaaagggggagacctatcatttatgttttccaattttgaattgtccaaatatttaacaaattcgcctaatattggttgtttgggggtgaaaaaggagacaccttgggcacccttcactgattgaaacattgcaactccaatatcaccactacctttatattcaaatactcatatagcttttctatattattatgatataattaacaataaaataaagatttagagcagaagttgtatatgacaattttatatagttttctttccttatgatttcctcctcccctttcctttttcccccctttgatcttgcagatcttgcatgattttctatactctaaaaaaaaaaaaataacagaaaacaaaagaaaatgctcggactttgacgaagtgtattgttcgcaatccaccacccctttttcttctccttctctcctttttctcttttgttttttttttgttttacactttcttttgtgttacaatcgtcctcgagagtgttacacccatataccacacactaaatcaaagaacccatacaccctgtatgcaccacagctaaaatatccacccagccacccacggaaggtctgggtgtttgtgtgcgtgtgtgtttcatatagttgtcgtttcttttttctttccgagctctctattctgtcattttctttgtctctattgtcatgttctgcaaaattaagacatagagagtaagaaagagaaaaagagagagagatgaaagaggtggagggaaagaaaaggattgaccgattatccatgttggaattagaatcatggctttttttttcttattgctaaaatatgtctagtctgtgtattttttttttaccaatatatcacattggctatatattgagaggttcatagtttgtttgttagttattagttatttttaaaagtattacaaagtatctataaaaaattatagaaagagaaaaactatatattttgattaattaattttactttttgattgcttatctttttttttccctctgtctttgccttctaaggtctgatttactgaggataacctttttctattgaatattcgatcattaattaattgctccacgaactagtaataatagtaataataatattgttattattcttttttttttaaattgtatcattatcgtttgactaatattgatagactattataacagtactataagaaagattattcctgttgatagacttagatagattatattcccaaataataaccattaaccaagttaaaagttatatttccttgttactagatatttttaaaatataactcgatctccatcccttatcctttaaccaaactaaattatagaaaaaagaaaaattacaataaaaaaagaaaaaaagaaagaaagaaagactatatatacatatactaacaatggaattaccttcgattaatagtactacaagtatctctgataatcaggatttacgtaaccactatgaaaaattgttatttaaaaaccagagtgagatttctttatcagaatattcagacaatattatgaataataatcacacacattcaactggcgttgttaatagacaattagataatttcagtttcattactggtttcaagaatttaaatataagtcaaacggttatacctactactgcaacgactactgctaccccttattctactttcgacaataatttgtttcaattacctcaaaatagtgtaaagtttaatggcaactaccctagcaatgacgttttaagcagtcgttatccctttcacagacacttatctttaccggaaaatcaacaacatttagatcatactcataatcaaaaacaaaacactgtatgggtccatgacgaaagtagaagatatccttcttctaatgcctttgtaacaacaacagcaacgaatatacctaataatatacctttgaatgtaaatggttatacaaatcagaacttcactcagttagcatatccaccgaatcgttttggtcaattacctccttcaaatataggtccaagtcctaaccataatatcagaaaacaccattctatatcaaatggtgatgtatcaaacaacagatataattttgataattcaataaacaatcaaacctcaaattatcttgtcgaacacaccatacgcaatacccataaacccaatgaagtatctatagatgatggtcttttactgattgacgagaagaatattacctcttcaaatgagttgcatcgattttatgagacatgtggtaataattatttctcaagtaatgttgtctttccatttgtcgactatattaaggatttgttagcttcacaaaatgatagtacattttcaaatgttcaaattgatcaagaaagaaagataaaagttttggattttttaaaatttcttcataattgtaatctggattttatatcacaaataagtaagagttctaataccgataatgatggtctagcaaatcagaacatacagaatatgatatctttcaagccaaaaggtttggttttagtagctttgaaaaatgggaaattggaattgttatcaactacccaaaacacaaaccttcaattgaaaagaggtgatctagtgctcattgatggtgatagaggtaaagatttagtgcaaattgtggaatccgatatcagtttgaatttggctttatttgctaattttttaaagaaaaaagtacattttgattcgttgattactactaaaagccaacattacccaaacgataaatttatccaagcattaatcaattctaaaaatggtattggtgaaaaattaaacaataaattgtatgataccacagaactgactcaatttattataccgtcaaaacaagttttaagatttgctactccttgggaagttatgaccaatcttcaatataagtttcaagatgaattaaaagctttgcacgttgcccagttgaaattacaaaatttgaataatttaaggagcaatgacggaaactccacaaatgtcagtggtatcaatactaataacatgaaaaagcctctaaatataaagatcttaaattctgaatttcaatttgataggaaaaaactcacattttattatatatgtgaagaaagaaatgattttagagaattaattaaggaattgtttaaatactataagacgagaatctggttatgcgcagtccccaataatttaaatatagattccaaatactatgataatagtagaaaagaattatcaatttatgagcagatgactagaagtccacaattcttagatttaaacaaaaataatcaatttactttatacactccaactacgtcttttgacgaacctttacatatacctccattgaataaagttgaattggataatttccaaattggaatttataaagaattattagatgaattattttagatgaaacaatagtttatgttataagggtttgataaaacatcattatggtttttatcaaagacttttgtagttaatttttaaacaatgcattgaataatttatatatatatatacatatattcatccatatataaataataatatataaatataggaaaaatcagtttatgctgtgtgttttgcacttgattttcgttttcttatttttttttttcattttaattcattatatcataaagttgtccagaccgataggtattttctatatcacaaatctataaataaaaaacaattattagttgttgtatagggagaattctccatcttttttatagttaaatattctttgtttccaaaaatctaccttttagatggttttttccaataatattgtttatgagttttacgacatgatcttaacccaagatttttcccacctttcaatgaaattagaacacttcttctttctttatcatcatcattttctagatcataataataatctgcttctagtaagttacctgctgcgtccttgccatatcttttgatttctccgatacatggtatgtcacgcaacaaggatttaattttatcctttgtcagggatcttgtagtgccattaatattcattatatgtgataaaggtgtttgttttaaatttgaaaatgcaatttgattaacaattattcttgaaacatcctgtaaattaatatcttttttatttagagtttgagtaatacctgtatttttatgtatgttaagctgtgtatttaattttcttttttttgatgttgactcatctttgacttctaggtgcgatttctctgacactaatgatgatagatgatatctttcacttatcttattgtttctttcatactgatctaaatgtggttctctagtcaatttatccatatttttggagccgtgttgtattaagtcttcagttactgaatacttagtgttatcatttttttcaatattaggactccattcaaatacacttatacctttatttgatgatggtttatgtttgtttgtactatcttgctcaaatggatatgtttcattttcgacactgatattatttatattattgtggaagctttttggtaattcaactttaaactcataacctttaccaatattcgaagtaatatttactgattctatcggtttaggtatcgtgtgattttcaagtttaaaagattttttttccgctgttgtttctgctaatgtttcagattttaatatacttgataaactaatattatcgtcaattgtctttgagaattttttaatgggtgactccacattattcaatctacgtatattattatatacatccgtatcaaatttatattttttttttattggagtctgtggtagttgttgatttagggtgtcattatacggtaaatgctgttgtcgtgatgatggtggctgttttggagatggtgttttcaaaagcatgcttggactacctttttcatttatgtgagaacttttttcagttgttggtgaattatccagatttggataaattggtaccaaatgttttgtcggtgtacaaacaaaatcatcactttttgtaggaaacaatgcaaattcatcttcagtgtcagtatcatgacaatcatcttggcacaatttaatcacacatttacactttctaaaatctaaaattatattgtctatcaggggtaattgcacaatttcattctttaaaagggaaaatgatatcaaattgttatgccttttcagcaatctattgctaattttattattattttgtatatgtgatgctattttatacattttaccaatagatttttcattaagtttattatcctttggttccacgctttctaaagaataatcagtccgactttgaaatgatataatcatactgttatgacctaggcaatttatgttaagtattttatttttgtcattgtaagatataattgcgtgttgccttgatatgtttttatgatgtggcaattttatgtcacatatgcttgattttcgaccaagtatataatgttgtgatgtattaggactaagaaagataggtatagtatcgcaggttgtagtatttatactgttaattgcattaggatgtgttttaatattgaaatgttctgttggagaaaaatcagacaaaagttgtcgtgtataatgtttattagtagtggtggtattatttttattggtattgatatcctttgttacaaaagaagaagacacaggagatgatggaataaaaattccgatacttgaagaaggatttggagtaggataacggtcggaatgggtgcgatggtcattggttattatttgtttatgatcatcagacaatagatttgatttatcttcgctaatcttgttatttttggaggagatatgatctgactgataccatttaacaggagaagatggggggaagttattagacattttattttttttataatagcagctaatatgtacttctgctccttacttgttctttttttttcttttgtttcctcagatttttctattacaccagcttgtcagacctttaattcttaccccttccatcaatcgatttattccaatgataagactaggcagttcaagtctgtaataatataccctaatgtattactctgtgatacatttttaaaatgttttagattatcaggatttttgcctttgatcatatttttatctgtagatctggaatatatatctttttgttcaattgttattttacgtgcttgtgaacacgaaaaagaaattgtaaacgccaagctgtttacgcgtcatttacaaacaaactaaaaaaacatgactgttttaacatccagacatctaagtgaacttgtcgggatttgtttttctcaggtgcagaaaagacgaatttgttattttttttgttaaatgtaataatttcctattctagatatttattctagtaacatgccgacatgtttcggtttcctttttatttttttctgtttgcttcttggtttgtttgtttttcctgtttggtgcaagctctttctccttgttctcccatacctatcttttagtggtggagggtaaacagaaccgagaaaataaactttagagggaagaactggaaaggatttccacaaccgatgcgcaattatacagcgcagtggagagagacgcgaacaggcgagatagacaggtagagagaaagacgttcaaacaaacatgcacagtgagaggggaaaggaaggagttgaacgttagagaacacaagtcaaggaatggcaagagagacttactcagtactgatgtttgtctgagtaaatggggggtagaggaactcttttgtatgggaagggtgtaatgtcttactctattgaacgtactgttgtgaagtaggagctaggaagaggcactttccaattccttgtacagatagagtttaataaaacattgaagacattggtaacgttgcttcttataagagaagtgttaatatagcttgctcttgtatagtaaatctcctcttctttgttaaacaacccgtaaccaaacgaataaagataagtaaaaatgggtagtatgtagggaaatattgttatttgaaaatataatgtgataattgaagtactcaatcgaaataaatcagtaatttgataaataaatgtggaagtaaaaaagaggacaaagcagagagacaatatttattagaatattaaaccaagttggaactttcgattcgtcacttatgttttagggaaaaatattgttatttttgatttagtgatttgttgttaagtaaattgtgttttccgatagtgtgatatgtgtgaaaaatttttatttgatatgagaattgtgttttccttttggttcaattgtatgggataggactatcagaactctgtaattaataagttttgatacttggtagactggcatctcacatatgaatagataaaagcagaagtgaaggaggaaatgaatatattatgatggtcaactttgaataccacagagcacagaatatatgcccgagttacctcttcattttatatgatttattgttgttgtactgcgagaatttgattttgaaaaagtaaggaaagttaattactaacgattttgtttttctctcatctctttttttattatatcgtatatgttgaactttaacattcaaatacatatccttaataaattatatgatgatcaatgaataatgaatgactcaattgttgtttgtttgtttgttttttaaatagagggtactccatctttcggtaagcgtcacaacaaatcccacactttatgtaagagatgtggtcgtcgttccttccacattcaaaagagcacctgtgcctcttgtggttacccaagtgccaagactagatcttacaactggggtgccaaggccaaaagaagaagaactactggtaccggtagaatgcaatacttgaagcacgtttctagaagattcaagaacggcttccaaactggtactgctgccaaggcctccgcttaagttttgtattgtatttaattaatttaatacatgcataaatttctataaatatataaatatatatatatacgtaaaattaataaataaattttagtatttgtatatggttatatattgtttgtttttctctataatactcgttagtgttttcctttgtcatagaagacaatagaaacatggctgatcccatttagagattatatagagtgattcaagtagtatctaaaggtacgaatatgagagaaaacaagtattgggaaatgaatatactatgcagttatatgagaaaaatatatcactatgtatatatatatatatgtaggtgtgtgtttcagagtcccattgcactatataacgaatctatttcatccatggtaagaagtccattcaatttggtctcaaatataatctttgccatctcttgataaactttatcatatttgatttgcataattttataggacctggactctaaatcatttgataattcatccataatatactcaggtatagtctccaatgcatcttcataatacaatttatcatcttttaatgtcagctcatttagcttgtcaactagatgacgatgatctttcatatcgtcatgggagcgtatatggtcatctacttgtgatactattatcctccataaagaggtgaccagttcagattctattgattttatattttgatcactaatgttatcaccaaaatagatcattagttggtatattaatctgattgtatgttccacattttgaatcttgagcattacatttgggttatcttggccaatatatgttactagcaattcttcttgttcacgagacagaaattttgtcaattcaaatagcatatcaccattggctataatttcattattaggataaaggtacaaaaggttctccaatatttgtaaaatgtcatttttcaaaagatgtaaccatctctctggtttaaaatcaagttgaccaacaattatggattcataatgatctggatctaaaatatcgtctttgtaaatgactcttggtaaaaattgtaatttacctctacagattaattttgatatgaatttggaccatgaattatgaccaatgtttcttattaatccggctacatcgaaatatcgtttttttgaaaaacagttagaatctgtctcttcaatcgggttaaaattccgtatgtttgtattcaatagtgtgtataacctgggcaaacaattactccaccaactggcttgtgggaagttcttagtatcgctatgttcctttatattaatgacagatatcaaaatatttgttaatgtattcaatatccctaccatgttgaatattatattaataattggattataggagatggagaaacataatttatataactgttccaaattttgtaagatgtcgatattcaaaaaatcgataaagttatcaatattgttatggttctgtaaaatctttagaatcatttccaaggtgtcgaatgagaaacatataattaggtcatctatcatttcatattggaagattctgggttcaacattaatgtggaggggtgagtcatgtaacggctttctcaagacatgttgattttttttaattaaatcacataagaaaataaataactctcttaaagatgtgtaatgaacggtacttggcctaaactggatagtctgaaacattaaacatataaggaatggtatagataaacttgtttcattttcatttaaagagatttctttaattaggtttgcaagattttccagaattatgttgataaaattatctaacttcatattttttttattaatcaataagaaagttgttattgattcaccaatggattgattttggtcgattgtaaacgttctataattgaaactattaatatgacctagtttgatattattaaggatttgcaaagtggtcatatcacattggtttaatctatgactcaataaggtatcgtataactggttactttcatcagatgagatgtttctcatggaattgttcaactgaacaaaattgtgtttatttaaaaaatcagcaccaacctttctttttttttatggatggagaggatttaattgttttaagatcaccacctagaaaagaagaagaattatcgttattatttacagtactgtagttagtattattattattgttgttgttgttatttttaattttgttgaattttgaccaagttttattttcaatcagtaagaattttttttcatcttccaatctttgtatgatttcttttaatttattaacttcatttagagtatcctgtttgatttgattttctttttctaattgaagcaatctttccttatctctatttttattaaacaattcgattttatctctaagcatactagcttctccttgagcaactgttaatttatcatacaaagatttaatataaccgttattgctgttattgttgtcattatttttgtcattactattgttattagtgttttgattaatgcttgcaggaatgtttatggaatcagcagtacgttcatagttatgtgtttgagcagcttgtgtaaatttagatggttgattagctaaacccaatatcaaatcatcatcatccgaggaaaacaaactctcatcaccatcatggttatgttcattatcagcagccctatctccttctttattcatttttatttcatggatggggaatcatatgatgtatctattgtttgtctacatcctttagcttatcttaatatgttgatgctgttgctgatgtatttggtctctgtgactaggtcctttaacatcctatcagatccatcatgcattgtttcttcttttgggatgtttatgtttatttctcttgcaatggttttcctcctccttctttctctgttctacccattcgaaccttttgcaggccacttttgtcaccaaaaagaagaggaaaaaaacgaaacaaacaagcaaacaaacaatttatccaactaaacattaaatgaaacacacacacatacacaagacatctccaaaaagttcccatttagaagtaatgggtagtgtcatttacatactttactggatcaaccacacacataacgttacaccaactatatgttgccttcaatacatacatacatagatatatatatttgttgaaatagaatgttctataatgaaatagatagaacaataagattttagcagacactaaacgataaattgttgagtaataattgttgagaggtcaccaaaggttgttgagtttgtttattaaatatcttactgtttgtagaggaaaatggcttaatgttaacatatataaagccaaggatttcatcatacattatttttatcttatttacaatctttgcgtattattacttctatgttgtatatagagaaagaaagtgaagaactttattataattttgtatactaaatctatttaatataatattgagaatgtttactatatatccaatgactacagacactcattctcaacaatattttatattagtaacaattactgtacaatgtatagtgaggctcccacaacgattaagggaacactaaaatagaagtaaaaataaaaaaaaatgaggggaaacctgttatccatcattccaacttagatctcaaacaatttatcaacgtttaatatctcaaaagagacacacagacaccatcttttattgcatcttaagacctctacagcaaatctctgacctcctatgttgttctccgtacagaacgatatacgtacacataaaatttttcttttttctttcttttttttttaattttttttaagaatgaaataagataaaatagaataaaatactcataataagaaaatgaagaacgtatgaagaagtaatgatggcaagcatcggttaatttttaatggttgcgtgtacagtacgatcataggtattgttcttctcttcattccctcatgtgttgattcataatattccattctacattaaattagggtcacacctatacactaacgcacacacacgtacacacatatacacatacatatacatatacatatacatacacatatatattatggttgaagattcaagagtaagagatgccataagaaatggtgaagaaaaagcattacctgcgtctttagtccctcaagcaccaactgttctcacctccaaggataaaaccacacaaagactaatcgtagtcttagctcaggcttctctagaaacacacaagatatcgtcccatggcccaggtggtgataagtatgctctgttgaactgtgatgatcatcaaggtattttgaaaaaaatgggtagagatataagtgaggctagaccagatatcacacatcaatgtctgttgactctattggattctcccatcaataaagctggtaaattacaagtctacatccaaacaagcaaaggtgttcttattgaagtcaatccaaccgtccgtataccaagaacttttaaaagattctctggactaatggttcagctattacacaaattgtcgattagatccgtcaattcagaggaaaaattattgaaagttatcaaaaacccaatcactgatcatttaccaacaaaatgtcgtaaagttactctatcctttgatgcacctgtcgtgcgtgtacaagattatattaagaaattggattctgatgaaagtatttgtatatttgtcggtgctatggcaaggggtaaagataatttcgctgatgaatacgtagatgagaagattgggttgtccaactatcctttatccgcatctgttgcctgttctaagttctgtcatggtgctgaagatgcctggaatattttataaggcaggagaaagaaaaaaaaaaagaataaacatttaattatgtaattattacaattatacagttttttgtactagttgtatatgtatctgattgttttgtgttttctgttgtctttatttgaaaaaacaacaacaacaacaacagtgaaacaaagatctcacatgtattataatacttttacacacaatctatttatgcttctttcttttccgttctcttttatacttctaatataacatgtgtgtcattctaacaattagttttttttcttggacttaaatttttcacctttgttttaaaaatgtcgcatattatatcttataccatacttgttaaatatatatagtatatacatacaaaaataaaaacaccaggaaatattccccctttcagttaaagaacgacatatgttaattctaaactttttaattttcataggtcagataatgaataaaaaaaaggagatctttcttgttctctctttcttttcctcttctaaaatcaagttactcaaaattgccgaatctaatgtacaaatttaaatcatatttacaattaaatgataaattatcacagctctggttaaataaatatacgataattttattactctcattcttcaaaattttttttttctatatttcgatatgtaatgaattaaacagctcaaaacaattcattatatctcattgtagaactattgatttaatatattacaattttttaacaaatacacattcctatttgaattcaataagtaattatttaattaaaaaggcaatggaagaaacaataaagtctattctaaccatattgtcacttttagtaactgcgagtgaagaattagtaacttttatcatcgatttatatctaggcacctatacctgcttattggtgagtactattgatggtgctgtcgatatagcaacaaataccaccgaaaatttgatcagcatagtaaacactactgtatccactttcgccgatgatctagaaaatggattaaatgatgtttcgattatattgaataaaataatttcgagcgtctctaagataaaaaattttttcaaaaatttagattcaaataatagtaacaaagcaagtgaggttacagataacattaaaaaagtaaatttaactattaattccttaagaaagctttatatttcgccatcaataaatgtgaaattaaaagaactatctgcgaagacaccagacttccacactgttaaaaatgaaacaaaatctttaattacaaaacctttccagatcattaaaaatgatattgcctcaataaatgtttctaaggttatagcaaaaagtaatatacatagcgtatatcaaacgcataaagtagctaaagataatacgtccttcattggaatttgctcttcaaatacaccagatattgaatttttttttcaggaactaaataaaaatttaaaaactgttacaattattttattggtattgctagtatttggtgcatgtgtgatgatgctacccgaagcatggaaagagatcaaacaatggcaaaaattgaaacattttgaaagggatatatttgacaaatacaacgacattcttataataatgaatgataaaaaagaatatgaaacagattccaataatgatttagacgattcctttgatgtaattgaaagttttaacaggtacttcaatgtttggcagacaaaaatttatgattttttgatctttctatttacttttaataagaaaaattacccaatgtcaaaaagaaaaaagttatcctggtttatttcatatattgtgtcggaaagggcaatttttgttctttcaattggaattcttggaatcattgtgtcatgtttccaattaataattttatgtgtattgaaaagacacatcaataaaattgaatcctatgcaacaaaaaatttcgtcaactcatcaaatttagattttttaaagaaagaccttacaatatggacccacaatacaaatcaatatataaactacacagaatcaaatattaatgaacaaatatttggatgggtgacgactggaacaagttctgttaataacactgttaaaacaatgattaacggtatagacacaacactatcagatcttttcaaagggactttactctataaaccaatgactactgtggtgaaatgtgttattgaggataaattatattccatagaacaggctatgacatggatccacaataaagcacatgtgtcatttcctcaaataaattccacagagttggtttggcaacttaaaaccttaataacacagaatagcactataagtgttaacaacagcatagcatctgaaaatactcacaatcaagagccactagtaatgaatatctggaatgaaatacagattctattatcaagtgttttgaatagccttcataaaacagtaattttggaattagttatttcctgcatcataatcagtatgtgggttattcaaattccattagccattctcataatgttgcagaaacagacacagaggcgttaataaaaaaagaagaaagaaaacatcaaccagctgcataaatgtcgtacttttcaccaaaatatacatttttttttctctctctctctatctctctatctctctatatatatatgtatattccatgttaaaaaacacagatctgatttatgccaagcccctctattgaggtgtcacaacatttttgccattttcagtaaaagccaaatacatgtatatttgtgacacaatgacctaatcgagtaatactgctttcctacatgaggaaattttaattccgcctggagtttccacacttccgcacttccggaatttctttctttaacttatttaatttcttttttttttcctttttgttgacgcaaggcttcagaatcaaaaattctagtcgagttcattttaaactaatataataagataatgtaacttacaataggatattggtggtattataagttttattattatttatagtaggaagttagtggtactataaattgttattttattgcttagtccttttctttctatataagtaatatacaagatacaatattatacagtatactcattttatctttgaatcttctttactataaattttcataacttttaatcacttagtacgatgaatttagattatcaaacatagctctaataattatatttcaacactttttctttcatttattttctattttcttgagaaatgacggaatttccaccagcactgtctgaaggcagcatcgttagttttgataatgatttttgattttgtcaagatagctatctcaacagttatcaaaccacttaagtaacttctgtcccaaccacactaaaaacaacactgagaataagcttatacaatcgaaaattcatcagatctttaaaaaaaactaaagacattgattataaggaaataataaccctgtcttatataactttccagtactttcacctctttctctttctttcttttttttttctatttaagttaagattgttcttaggatatcctccttccctctattaaaaatcaaccagcatattattccaacttttttacactcattatcgctagcccctctaatcacagaatatctattaactataatatcattgagaaaatacagaaacaacaagaaaaaaaagtaatagaacaaaacacgttataagaaacaagagagttcacatttatcaccaggcaattctctaaagcatgaaaagaatattctcaggtgcaaaatcacctatgataaatatttcagaaaaattcagtaacgaattaacttcccaaacaatagaaatagaagataaatcattgaattctatagtaaatgaccaagcatctccagaattaatgcctattttgactttactatctgcacatttacatagaaggtaccatgagggtgttttgttaatgttagaagatctaaaaaatgatggggctcctggagctagaaaatgggaagagaagtatgctgtacttatcggtactcaattggcattgtggaatgcgaatgatcttaatggggtcgatgaagctactttaaaaaattcagctacaaaacccacctatataaattttacagatgctaatattcagtgtgtggaaacggttaaaggtgtatctgcccagaacaacaaaaaattggagaatattcttgttgtatctactactttgaaaaatagatattttttacagttcagtaataaagaatcattcaatcagtggaatgttgctgtaagactgagtctttatgaatccacatctttacaagaagcatacacgggtgcatttatatcaagtagagggtctcgtttaagtgatataggtgtattattggcctcaaccaaatttgattatgaggaatgggtaagtgttagatttggtgtcggcatgccgtggaagagatgctatgcagtaattactcaaaatgtcaataaaaaaaaagatacatttggtgaaataaatttttatgaaagtgataaaaagattaaaaaacaacattcaatgacaactgtgactcatgcaaatgcaatctatgcagtctatccatcatctcctaaactgatcgacaattctacaatgattaaactggaaggtaaagcaaaattcaaaggagatgataccatccaagagactaatttgtttatcatgcctgaaagacacgaagctgtgccatgttatgatacaattatcaggtttctacttccagcaatgaatgcgtttaggttatatggtagaccaaagaagcttattgctaataaagatgatccaatttcgttactatttgcattacctacattgcctcacatatattatttacaaccggaagatttaataccattaacaaaatcttcaagctgtctttattggaattcgtctgaatggacaactaaaatacgcgacattttacaaacaaaattaaataaagggtatagtggttgtggatcaactaaatctttaaaaaatattcttggcacacaatttttagagagtggtgaattatttcaaacatctggaaatatcttatcaccattattaaggaatactaatggtaaacctgacatattttcaccaaaattgaatgccagcaaagtttatcagaagaataacagtactggctttaaatcttcaacaagtttaaagagttcatcatctaaatccctagaatcaccattagatttagatacttccaatccaggagtattaaaaccagaatttactgatcaggtactagccaacaaaacggtagcaaagaatcaaagagatattttggaaacaatcaacaatcaacaaatatcagaaaataatcatacaaaggagtttaaagatacacaacatacggtaataccaaaagtaaataattcaaaagaagaggaccacttcgcacaagtcaataaaagatacaacaattttgcagccatgactgcgaacgcgagggaaaatgaatactcaccttctcgaaagtataaacctgaaccattaaaattacaaagttccaattttgatacttttgataatcaatcaagtgcaaaaaattacgataatagacacacaagagcggaatcaagtttctcatttcttattgatgcctaccgtgaaatcgaagacaataacaattacgatcatccagaattcagtataaaaatgaaagaattaaatttgtcaaaagaaaacaccaataattcgagtgagcatgatgtttttgatcctgagtttgttgaacagagtcaaatgttggagatggaaaatatatatggttccacgacaaataaaacccaaagatctatagtcaatgaaaatagtgacaaggactataaagataaaactgttatgaaacaagaacaaatcccaagacatataactactgctaataataataatgatgatgctaatgatactgataaacaaaatgtagatagggaccgaactgtaactcctttggttgctcaagttaatactaataacacatcaaatataaccacacagaatataacacataagaaacccccaccaccacctccaccagtgaatcaactgctgccacaacaaacaagtaatttacaaaagatggacaataataatggtatagctagtcaaatgattcctaatccatattctatgaaaaaagattcattatcaaatactggagcacaacaaatactaatacaaccacaaacatcagggtataaccaatcgcctcatcacacaacacccaccaactactcccctgcattcaaccaacctttactaaataatcaacatcaatatccctcagttaaccaatatccacaaccatatacaaacaacccaaaaatcactccgagaacaatgataccaactgctaataataataataataataataataataataataataataataataataataataacaatatgaacaaaatcttgtcaaatcaacaacagcatcatggatatatacaaaatatatcgtacaacaacaatactggaaacatgaattatccattacaaaaccaatatccaccatcaaaccaaaggctacctggtccaaaccagtctctaaactacagaaataatcaagcatcatcatattcttctaaccgacaatttaatagatatgataatattaattataacaattacaattacaataactataaccataactataaccaactaccatattccaatacaagaaccattaataatcccaatcttaataataatgccagtaatagacatgcagcaccattccatccacaaccaccatcgcaacaacagcaacaatctcagttcataagacctaaacctgctgggttttcccaattcatgccatcacccaatacgagtaacggaactaatccgtatggtatgtctatataattaataaattgagaaaccaataatcctagtacaaattctaagacttgtacatgtatgtataaattatatatgtaaatagttaaataaaattgtaacactagtaaacgtttaaaggaaaaataaaaaggtacaagataagatcagatgagccattttattttattctattttattttaattatcagtagcatcatgccaaaaaatagttttctcaagctttcttaactcttctttatcaatactaagcatactcacgttttatttttatttttaaagagtagtcaacacatattgcttgcaccaattacacacacacacacacacacacatacgcacacacatacatacacaattttttcaacaaattgtaatgaactaagactaaaaaacaaaaaaaaaagagatctgtttagtacaatttagaaaaatgaacctcacaattttttttttaaagaaaaaaagatcacggcagaaagtaattacttcaattctctttaactagttttaatgctggaggttagggatgagtgtatctagaatatctacattattataactgataactctttgtatatgtatatatctatgtatctttatttatatttatttatagtcatttaccttggagtataattgacataataaacattctattccttaaaccagcaaattgttacgagacagtagagattctatatataaaattacaaaaggacaaatgctggtaaatattgcaaattgtatatcctcgtatattttgtaaccctcactgttcacacgcctttttgcagattacatagttttctaggctgaataacgttaagattccattaaacgaacaaggaaagttgttagacacagactaatttgaacagtaagaagagaaaaagaaggggtggtgatggtggtggaagagccaaacacgtgacactccaaacttcgccggttgaaaaaaaagttggccaatatgtctgggtctttcttttccctctccccactcccttttttccctcccacagtttatgggaaacaaaaacgaaaacagcagcgaaatcatcgtattgtctttgtcaaaccacaaaacaatacacagcgattggaattctgagtcatattattgtccagccatttttgctggaaactgtgttcttgtgtgttcattgtctgaaacagcggcttgcttattcattctccaccggattctcaacggaatcctatccctaaacgaagacacctgtctccaacacaatcccgccaccttttactggtacaaaccataatttccgtcaggaaaactctgatgcggcatccaccagaaccgacactcacacacttctctccctcgaacagaaaaacaatagaatacacacatccacacaccacatccacatacgcatgggtaaaaataatcgggacttgtcctttttttctttctttcttttttttatcttgttatttgttatttgtttgtaaagaaataatatattattataataaatatctttaaaactgtggtgatattttgaagtgtgacaatatttgtacaaaacacaaggattttaaccacagaaggtaaaaagtactagtcattaccattacttatagtagtattattctttattattctgatttttattgttacaacaccatcctatccttttatcaaccgcatgcagtccatcgatgatataaatacgtctttctgttagatgatcaatagaacggtctaggtgactttgatttgctatatactttccttttcttgatcgattgtttataagaagtgagtctcttcttgcaacatattttctattacataatactcttactcttatatatgcacaactctatcacctatcattcatttatcgcctttattattcctaagttgggtgcatatatatcccatacagtataacacaacacataattatcatccttattttttatttaatcctttttattattattattattattattattaaagtgttactttccgaaaaaacataataacattgaataaataaataaatacataaagaatagataaataatatattaacatagatatatatattaaagtgaaaatgagtactcaaagcattaatcatacgttaaagtcaaaaactttaaaagaaatagatatcgaacaaatacatgaaatcaatccgttcagtaaattcgttaacggccaaagagtagtagaaatcccacaattacaactggaatccggtataacgataaataatttcccaatcgcttataaaacctgggggaatctaaatgaaacaggtgacaatgtattagtgatctgccatgctctaacaggttcctcagatgtagctgactggtggggacccttactaggtgacgatttggcttttgatccttccagattcttcattatatgtttgaattccatggggtctccctatggctctttctccccattgtctatcgacgaaacaaccggacaaagatacggtcctgagttcccattatgtacagtccgtgatgacgtaagagctcaccgcattgtgctcgattctttaggtgttacgtctatagcatgtgtcattggtggctccatgggtggaatgctcgcacttgaatggtgtgctatctacggcagagactatgtgaaaaacctggttgctttggcaacctctgcaagacattccgcttggtgtatatcctggtccgaagcacagagacagtcaatatattcagatccaaactattgtgatgggtattactccttggacaaccctccatctgttggcctttcggctgccagaatgtctgcattgctgacatacagatcaagggacagtttcgaaaataagttctccaggcgaatcccctctgcatcacaacaacaaaagacagcttctttgaaggatgaaccttatccgttacatcgtgaaccttctactgttaatgaacaaagtctacagatccataacgatggtatatccagtttaaatagcgcaagactgactgcacattgtcaagaacagaatagagatagtcccataactagaaggaacaatagcacatcatcatctaattcctctattacttctataacgtctataagttcagcagtcgttggcgaagtaaaagagactaaaccagcacagacatatttctctgcacaaagttatttgcgttaccaaggaacgaaatttgtcaacagattcgacgctaactgctacattgccatcacaaggaaattagatacccatgatcttacacgtgatagggaagagtatgatgaaaatatcgaacaagtgttgaattctatggaccaaccttccttgattattggcatcagttcggacggtctcttcacttactcagaacaggaattcctggcagaacatttaaagaatgctcacttggagaaaataacgtcaccggagggccatgatgcatttctattagagttcaaattgattaatgaattaattgtgaaatttttgcgtaagaactgttcccaatttaccagcagcaaaccaagggaatgggttggaaatcctggaaaggatgaaaatactacttctgtgtttggtgaggctgaagaagtgactaattggtagcaattatcggtaaaagctaagttataacgttaatttcttaaaagataaactctagcttttccaacttagcatctctccccttctcctttcatgctctttgtttttattattttcgtaacacacctatagaactatatacaaatatacatattcgcatgcatatatataacaaacaagcaaaaaaaaaagaaaaagggaattgatatcaaaatatagataaatagataataacattgatcttcataccaaaacgcacgcttactcctaattctgcttcacacagtttcatgactcgttagatgctaacaactgagagatgcagtctttttattaccttatatcctgtttataatcttggaatacgtgtcacagatatctgcatccattatatatcttttttttttcctttttttttttcccttgaacccttacaagatgcagccgttcaagattttcggagcgatgtatgtatctttttacccacaaagtatatgctcacatacaacgattgctgatcacactgctgtatataagaagaaccatgtgcttacaatatcccttaaacatgatgattaactttgcaacttctcagataggtaaatgaaaatatggaaggtgaacatttctataaaagataagaataccctcgaaaaacaacaacaaccactcactcactcatcgcacatataagagtgtggaaatatcaagattccttctttacatatatataaatatctccgtagtttacaagatctttgacaacatatccatattagctaggaaagaaccatgtcagagatacagtcaatagacataagtgatttatcacacgatccaggcagtttaagacacagagaaacttcaatagctcaagaactcatctcatatgaaagtaatgttgacgaacttacagatagtatagtacttaacaatgacacatctgagctcaaaatggcgccagaatataagcattggattcacagaattccaagagttggtaaaggtatttacgtggatttatgtgatcgacttccatactataaacaagactggttggatgcatgggattatagaatcatcccgtctttattggaaacatattttaataatttactacctgctatcgcatttgctcaagacatgtttgatagaacagataactcatatggtgttaatgaaatattattatctagtgctcttggtggtatcgtctttggtattttatctggacaacctttatgcattgttggagtgactggaccaatatcaatatttcactacactgtctatgacatcataaaaccgttgaatacaaattattttgggttcatgttttgggtcgatctttgggcatttattttacatcttatattggcacttacaaatatggtttctcttttgcagtatgtcaccactttcccctgtgacatttttggtttattcatcaatattgtatatatcgagaagggaatacagactttgataagacaatttcatacagaagacacctcatataatgaacatttaatatcaggattcgcatctgtaatggtagcattattaatgtccatttttggactgtttttcaaagagttctataaattcaactatttaccccataaattgagaaaattcatttcagattattcaacagctttatctgttgtgttttggtctgggtttgtacattttggtggatatttaaatgatgttaaatttcaatttttaccaatcactaaatcattttttcccactacagatatgggtagagcttccaagacatggttggcatataaaacaatttctacaaagaatatatttattgcattaccatttggaatcatcttaacgattttattttattttgatcacaacgtttcatcattaatggcacaaaaagctcaatatagattaactaaaccatcatcattccattatgattttctattgttaggtgtaactactgtagtagcaggtgccctcggtataccacctcccaatgggttaattccacaggctcctttacatacagaatcattattagttttagacgaaaataatcatgtagtaaggtgcgttgagcaaagagtaactaatactgtccagggattattaatgatagctacaatggcaagaccttttttaatttgtttgggaaaaattccacaaactgttttagcaggtctattttttataatggggatacaaggacttattgataatgcaataatatccagaatcctgtggcttttccttgatccaactattaaaagtaatgaaacttcacctaaccctatatcaaaggtcccactgagatcactattaatctttatcgcttttagcttagctgggtttattggtgaatttgccattactaatactatagccgctatcggatttccattggtgctattattaacagtgattatatcatttctgtttcccaagattttcactgaagaagaactagagatattagacccaccagtagctcaaaggtttactataaaaaatctgttatttgagaatttatgtaatgattcctcatctattatggaagaaaaggatttcacaagttatgatatccataattcgccctttggttatcatagctcatgtgcagacaaagaaaatgatagcaatacaataatacattccacagttcatagtactcatagcaagcacaatttttttactaatactatatcagcagcctctatatcaaataataatccacatagtgaatcagtatctccaatacccaagtcacaagcaaatatttctattcataacttggaatagtttatataacttattcttcactatctttctgtcactttcccctattcttcctgccttttcacatgttatctattacatttatatacatgtatatttatatatatacccgcattatcaaagtactaataatattcaatttgtgactacaattatttaggttacgaccgttatttatccttatccttatcattattattataagtaataaatataaaaggaaactaagctaaatttttaaaccattcttcctcgcaaatttcaggcacaattgaaataactttacctgtttttataacactctcaacgttacgaaacacatgttcttccatcttctgtgttgtttctacacaatatgttcccatatgaggcagtactaacacttgtttcatatccattaactcctttgatacatgtggttcaaattcaaaaacatccaatcctgcagacctaactttcccagattttaaagcacaaattaatgcgacttcgtcaataatagcacctcgagcagtattaacaatgacaacaccctgtttcatcttttcaaaggcattagaatccaatagatgacgagtattttggttcaaaggaacattaatagatataatatctgattgtgttaataattcatcaaatgaaacatatctacaaccattttccaaatcagacgacaattttcttctattatgatatataaattctttaaacccaaatggtttcaatcttttcactatggcacgtcctataccaccaagacctaaaatcccaactgtcttgccttctggatcatgcccatatggtgtacctgcgctctcaccagtttgaggccatttaccttctaaaagatttcttgacccatatgaaaaatttcttaatgcacctaagagaagaaagacatgattatctgcagtagcattacttacaatatggggggtattggacacttgaatatgtctatcattaaaatacctaacatctatttgatcataccctgcgccattgtgacaaattgcaaccacgttgtcaggtaacttttcagctaattccttatcgaatctaccagtttgtttaatactacctgctgttcttgtaataatcgaaaccttggaaagtttagaagttggatcatttaataaggtaaaaaatttttctcttgttgtatcttctggtaatgttacacattcagcaattaactctaactgttgtaaagcttcttgagcaaaacgtgtatcaccaaggcaaagtacaactggccttatcattgttatatagaagtactataatagcaattaacctcaatagaaaaatatttctgaccttttcaatcgttattccttcttttagtctttctactgcagtaactagcctgttgcaattgaaaataaatactgtaaatgtacaagcatacaaatatacgtgcaagttaattgtaagggaataattgttggctaaataagttttttttattttaaattccgctatcaagtcagccacgtgttatcttttgtctcctattatcataacagcgcatatcaacgttcaacgacaacgagcaatcaaattgtcattatcatatagttctaattagtaaactgttttgatatgattgtgagagtttatatatcatgattttcttcttatacatatattaagtcaataaatgaaaaaaaatccttaatttgattacttacataatgtaaaaaagagtatggatttttaattactaatattaattacgtcatatcttttgatctcttgtacaaaattagcggaaaaatgccgacaaatacggcttattacggaaataaaaattccgacaatcacgcacaatatcaaaaaaaacgcataaaacgaaagcatcaaacagaatgataatagagaaaaatattcaaagagacacgtgagtgatgacagcagttacttcaaaagagatgaaatactatcattttactatcgatattattgttattagtattagattaccgttaaaatgaacaaatagcaagaccagttcataccaaaaattcaataactgaactattattcaccattattgacatttaagtattcgttaaaagagatctaagattcaaaaccaagattcaagctattactaagctaaaattacattttaacaaacatctattctttcaatatttctctattttttaatcaaatcaacaatcgtaatcagtattttattgggctcaatattaaccatagttaattatggaacaggagaatcctcatacagttttacgcgctagaattgcacttttagctactgctattggtggtcctgattatacttcaaatgtggatcctccaccttataagttaggggatgactgcctagcatgtttgaaagatttgaaacgatggtttaaattggttgatgatcaacaacatacatgggaagtggctatggctgccgctgagtataaaattttcaccgatgatttaataccaattttaattgattgggaaaacaagtcttgtaaggaagccaaaatattgaaaaaaagacaaaaacaaaatccagatgatcctaatcaatcgtcagtgcccgtaatgaaaaataaaatatttcatgataaaattgctttgcattgtctacaactaatggtgttaatgacatggcctcttataatcaccgaacattcttcttctaaccaagtcaattactatgcagacttgaaaaaatatcagctaatatataagaaggcaattttgtcaactgaaaatggaaaggtcttgaaagcagttaacaggcttgttattaaggtgatgaaggtagatagattatcaagaagtccaagagacaatatgatcattaaattggctttaaatttttttagaaatttgattgctattgaacctggtgagattatgattactagtaagagacagactaaaactggatcaagtgaaagtagcagcaatactgttaacaataaaggtattacaacaacagattctttacctccaaatgtttctcttgatgatatttctctaaacacattaatcaaatgtttccatgaaaataaagttttatctctaattttgaccttatcaagttcattaaatacagaatttgatcaagatttcattaatattcccatcttagaaattatgttttatttaaccaaagatattaatccaaaattattatttaagcaagaaaaaaataagcacggactactaccacattcaaatgagtccgagggtggttataaactgtatacatctatacctgaaatggaattaaaagatttattgaaaaaggagttacagatgaaaaaacatttgattagaaatacatcttcaagacattcaagatttggtgcactgatatcaatccagaccgacaatcagaccagattaaccgtctccgggacacaaaacattttaaatgaatcaacagtcttaaataaattagatagcaggaaaagatggaataaaagaatcactcggattaaagatgatccgttggaagaaggcttaccgaataatttattaaattctcaaggttcaagatttttattattacaaagtcacatggttgatattttcacaaattttattaataatttcattgattctagttttaatatccttttacatagtatcactaattatatcactactgaacaagataaaattgttatgatagagcacattgaataccttttattttacgcttggtttctcaaatatcaaatgctcagatgttctgtcaaccaaaacgcagatttaatctatgtgtcggaagcattaaaagaaacctcctttatcttagtatcccatttattaaggacttcttttgacatgagaaattggatcatggtgcatgcagcaatgatcgcattcaatgaattattattactagttaataacgaaaaaaataatgatgctgattcagaggatattgaatttattctaagtcggttatttagtgatgaaagaatccagctattgtcaaatattcccaagacagcaatcaaacatacaacacagtatatgatgagttgtattgatttaacacataccgtacttaaaatattggaacagtattcatcagacaacaataaattgataataacaggtaaacgaaaaggaaagagaaatcttcatattagtgaggctgacattgaaaaagttatggaagaagacaaagtagagagagacgaagctatcgatattttaactccatcttattcctcaatagaagtcgacttcaaaaaggttcaacgtagttatataaatgattttacaattgaaacctatattacttttttaagaagattcagggagctagaaagtgatcaaatcaaaaagattattgcatttttccatagagtattcattcaagcgaaggaagaagcgtatttgtttagattagacttgattgtacttttacatgatatgctaagtgaggatggcattgaaaaaagtgctagagtgcgaaaacatgtggaacaatttactaattactatttgcaaagattaaaatcaaggataaaaaaatcaccatcatggatcatagaattacttttcccttcaattcatgatggtgaattatcctactaccaaaaatacggtgaaaaaaaacctcaatcaaaaaacccagattatggtgtacccgaaagcttgtttaaaccactacctgatgaagagatgctaccaccttctacagttaaggatatgaaattcggaatcttggtggcaacactaatcgatgaatctaaaagtgaatatatagataaactaattgcgcatatatcaaaatgcattgacattttcaaatcgtggttaactgtgaacattttaaatgaaaatgaaacagctagtccaccagacgaaaaatttacaatgtctcaagaatttggtaatcctatactttccgatagagatctgagagccctgttaaagttaattggatataatattccaatgtcagcagcagaagcatgctatttacctggttcacttgaaatttcacagcttaaagaagctttggatttgctgaaaaaatatacaactacaacatttgaaactccgaatggattagctgcatcaacatacttgatacgcccaagaaaagtttacgattatgtatctagtgaagaggatggatggacagggaacgaacagtacgatttaactgatcccaatattgttcaagatgacgaaattgatgatagtgactatttcagggacttggacaacaaaattaagatccatacaagggaaaacaattcgcataaaaaaggtatagcagcatcaagaaaaaagagtagtactaagaaatctaagaacagcgttacttcaaaaaaaagaaataatccagaaactcttaaaccacaaaaacaacaatcgaaagtttttagcaaagaatatgttgattctgatgattctgatgatgaagatcagtttaatccaatattctttgaaaatgaaatgtatttacgttggctgctggataaaaatggtgggcaattatcaccaatgcaacacaacatatttgggaaatttattaaggagagaatagacaataatgggagcattttaagcgatttttctgagttatttaatgggcctattccccctatcgaatccttacatcgttctaacacaattagaggagatgtcagtaatagcattattagcacaaacaaagggctaggagctgcttcattaaaccaatcatccctcgacaagattacaagcaacagaaatatagtgaattcaatattaagtaaaaatatatcagatgaagaagatacatttatcttagatagcgactataactcagaagtaatacccattgaaaattcaaataaaagaacacatgaagatggtacacctacatctaataatttagaagaagggaaaattcaggttagaaaatcaaaaataagaaagatagcattgaatgatgatgaagaggaataatcatatataaggtaaacttaaaggacaactagtgttatttacacattggtaatcattataattacttatctatgagacaaaacaataaattgtaatgacaattacacacatatatatataaaacattagcataaaactaaatagatcttcaataatataagattacaacattaatcttttaactatatttataaaattgaattggaaaattttaattagataccatctcttgtgtcggtgtactgatcagtgctcgattcatcatcatcattagtttcattattcaatacggttgattcgttttttgtttcatcattttcgtcatattcccctattatatcaatactctcttttgttctatcatcaacatctgtagcttgaacttcctgatcactgcccatattcccagaaactgcttctaaaactaattcctcggaagaattcaaattaggttcaagctccttgtcatagttatttttttcacttgcaacaatgttaccttcggtattcatcgatttttcatcagtttttgaattactatccaaagatgatggtgctcccgacactacctcattacaactagataatcttgtagtatctgattgaacagatttatcacttgtaccttgtgatacactcgtatcacaatgtttatctatccttccaaaattaatgttaatatcatcattttcctcattagtattactctcctccatattaattggaccaattttagtagatattgaatcactgatagaccaaacaccaatatgtgcccaatgtaacatagatcttaatttacaaagctgcaaccacgcacgttcaatatttgtactaggttttccggaaatgtctgtttgactttttgtattactttcaacatgaggaacacacctacttgaagaagtattaatacccaatccacctataaaactcattcttttaatacgtagttcttctctctttttttttatattaccactgttagctgaggagcctttagttttattagaatttatcggtgctgtagtttctacaccactattatcttttattgtaactgtttccaaattccatgtccctaattttaatgagcgtaagaatgcataaatatcacaagtttgtctaacccttaatacacaccataaacataaaggatatgagttctgtattgttgaattcccactatcatctcttacttgcacttttaaagtgtgcattcttgcatgtgtaacattatcatctcttgattcaccacaaagtgcgcacgaatcgtgtgtagcaacgggaggtgaatcatttggataattaaaaagatgagaagaattatcattaacagatctgttcatcattggtgaatagtaaccaatttgataagtttcattaaccccgctaattggttcaataaccactaatccatccatcatagagtttaagagactctttctgttccatatactaatacctggagcattatcaatttttaatattggtgatatttcatcgttgtttagtcttcttaaaagtttagaatcgtttgagctgtctcttattgatttacaagttgataaacatgctataaatttcaaaaattcttggtatagattcaaatcatatctaattgctgatacgttgggagaatataatactgttggggaacttggaagttctgattgtaaggaattctctgtctttgtttttcttaatgatagattatccaaatccgaaactactgtggaatatctttgattatttgaattgtagattgatgcagattcggattccattttttctacatatcttttcaaatgttctaattgtgccttcattgtctctaacgcattatccttgtccttcacagattccaacaattttctatttaaaatttctgtagtatgtttctcctttctagcatctgctaccatattgtttgcttcagcaaataatgatgcagtcaaatcttccacttcaccttccaattgttttaccatactctctgcctcagttcgaagctttttttccttttgtagatcagctttataagcagtcaattgttcctttgtattatttaattgcctttgtaacgtttcatagtcttgtttcaaagtcatatatttgtctgattccttttgtaaaagagttactttcttagtcatttgattcaatttagcttccaatccagattgggcacgtatactttcaatcaactgggttgacatagctgtcacctgttgagatattcttttgttttcttcgtctaattctgtcatattttaaccatttacagttttttttagattctatgtctatatgttccaacaacaataaagtattcaatagtaaaacaactttattaacacaaaacacaacagctgttgacactagatcctatttttttataacaatctacatggagcaggacaaactactttgcctctataaaactttaacaagtctttcatagatactactatttaatttaaaaaaatatacaaaaattaaaagttataaaattgcataaataaaaaaaaaatcatacacggaacgatgtaaacgaaaaaaaaatccatcatacataagattatatattacatgcaattgcacacgtataataatcccacgaccgccattactattaccatgataactatgtactgctatgatgagagatcgaaaatattaggcgtctgcaaaatgtagatgcgaatataataattgattcattaataatatattaatatatgtagatatgtatacgtaaataaccatatgttgtatatatgtatatatgtatgcaaatagtccatgcaaaaaaaaagttgtaaataaattttctcaatattattcagctacatcagagagatatgtatccctttctgaatttgaattttgtgacccagccgtttcttcagaatccaaaaagactaatctattagaggaagaacctgtagacatagtgctactaccattacgtttcctacgtgcacgcaatctctcacgatgttcatccaataatgtattctttttggtgggtgatacatctcctcttaattccaataacaaagcttttgctctatctgtaatttcatcttcatcttgagtctctgagttgacgattctatgagcaggtgttggggaaccagtaatatatggatcaatggattttttctttgtatctggtgaatatatcatggaatcctcatctgtatccaactcgttcatactcccactcgtgttcttatcaacagccattttctttcttgccaaagctcttttccttgctgatgatggatctgctttagttgtccctgcattctttaactgttctaataatacatccattactgcccgtttatcgccattctctgaagattcctccaagctgtcattattattactatctttgccactttctctctctctttgtttttgttgagcaagttccgccttcttttgctgttcttctatcatcttcttatgtttttcgtaggccaattcttcttcttcagctttcagattctgtaattgagctttcttatactcttgtataaaatctgcaaatttcttaaaaaatgaatccttagcaaatttatcatcacaatcctcaccataaacttgcatcaaattattaaattccattatggtcagttttacttcatcatttaatagatcacccttctttaaagcttcaggtaaaaatggcaacacttttactagcaccctatctaatggatggaatttagaagaatcactcaaattaccaatatcaatagacctctccacattaacaatcgattgactaaattctttacaatcattgactaactgttcaatagatatcttcactacatctaaaactggttccaactcctttaaaaaatcaccaaactttggataattcttcctaactatcttttcaacatagtttaaaaatgtcatactgttagtagtatctttaataaaagtcaatctttgtaacgttgtcaatttaaacccttgtgcttgtttagatgcatcattcatatagttaccaactgctaaaataacattgaaaacatttcttaaattttcagaatcctgtaaacaaccaacagctttatcaattttccttaatttacctaataactcagaatactctctttcatatgtggtgatgactttaattgctctcattcttgacgcccagtaagattgaagatttaccatcaactgaagatagatttgatcagccctttgaagttcgttaggatccttttcaggaaatttagcttcctccactgttttcacaccatcccaatcagtagtataaggtgcaaaattccttgctaaatttacagaaacctccactatttcctgtttagataaaaagtcaatcactgtaggattttgaagtacatctctttcgcatcgtaatatttttgtcactaaatcagaaacttccaaattactgaaggaatggagattgattccaaattgttgagaaatatcacgacttagaaaggttattttatctaaatcttccttccttctagaatgtaacgatttaatctctcttgcagcaaaagctctttccaaatcggataaaacacccctttcatatagatcatctgcaaatttttctgcttggctgaaattccagattgagttatctgttgattcaagcttttcccaatgtaattgttttaatctcttctgtggacgtggatacttttcaaaaatcccactagcagattgtactaacagcggtgaagcaatagaagaagaactgtccgactttgccattaaaggaggaacaggaggtattgtagataatctgttaaatgatggaggtggaggaggagcaataggtggatcagatgaaaatatgtcctcattattagacaggaatgatggaggtggaggtggaggtggaggagggattgttgttgtacttggggtatcttgcaactctgattctggagtggaatctgtgatatcagaggccagcattctggcagtggaaaacaaagaaggcaatggaggaggaggtggtggtggaatatcagaagaagaagatacaattgcttccttctctttaacaggcgtatctggtgctgtcttgaaaacatcctcagatgtagacttggatccctcatctttgacagcttctgatccagtacctagaatatcaggttgcttgtcattttcatcatcaacattatcattaccggtagccactttctcagttgctgaattattcaaaacattttcttttgtttcaagatctttgcctggaacttctgccacaactgtcactatatctttttcaccatcctcttgtccattaattgaaactgcaggttttactctttggctaagttcttctaaataaggggccggaccagaaaaccttcttaatctatccatgacatttcgttgagactcagatataggttgcgcaacctccttttgaccagtaccatacttctttgataacgtttctaaaaaggaagtagataccctagccgacttgtctaatgtgtcattcgtgacatcattatttgataatattgaggaagaagactctgagtctgaagaagatgtagatgaaaaagaagagttagatacattgacatttttttctttcgctacacgatcctgcaaaataccttgcaaccttgacaattcttttgttaaacggtcaatctcattaagttttatagttgatgatcttggatctagtgtactgtagccttcttttcctgaagaagtggcactaaattcagttttctctgtatctgatatcaattcatctatatcaaagttaatatttaagtctttaaactttgattgtaaatcctttaacctttgtaaagcctttagtttcttgtcactaaacatttcattaacacgttcttctacattaaatttagaaatatcgttagattcattttgcaatgacgcaagaatatcccttaactcatttaattttttgatatttgcttcttgtgaatctctttcagaatctaactgagaagtacttttctttatattcttctttttctttttcttactttgaggtttatcttcagagtttgttaatctttcaatgtcaacaaaatttgtcatttccaattgtcgtgcctccttttcaatatcttccatctgtaacctaagtttttgcaatctttgatttggttgtacagtgataccaaatttccttgcatcttgagtgaaatttcttttattcttttgtaagccatcttgaataaccttttgtatattgaattgctttgtttcatctacagaatctttaactctaaatctatttgaacgattctttgtatcttcgtataactccggctttgaatttaaaattgtcaacatttttcttaactccacttcatgttcatgtttttccattaaatttctctttttcaaatcatccaattctgattgcaattgttgtgtgactctttgattcttagctagtaacctatctctctctgagatctctttctctaattgacccaccagaccattttcagctttacttaacttttcttgtaaaattgctttgtcagcttccacctcctctaatttttttgttaagagtctactttcacttattgcatgtcttgccacttcatcagtttgcattgcatcaaacaatctttgtatagtcatgttcatagtagcgtcttcatctgtgacagcagataatgaggaaccaacgtttgtgactaatgcatccattaatttcaattgtttagatagttgtgttgggtcctcattattttccataacttttgtgcttgaaagaaataaatgttgtattaaagagactaatagagattcatttgacgtacttttgcaagaatcccataaattctgtaataatgatattggattattcaaatcaatatctgtcactttcttttggtcttctaatagaagattaaagtcatctaatttagaattttcataattttctaattcagtattaatcttttcataatctagtgatctcattttattcattattcttagtaatctataattttccaattttgttctcaattttcttctttgatgaatatgattagatattgaacaaaacttgtttataaaaattaatgaccacagacaatattctaatattgaattttctccatcatgctttctgaaatcttcagatgcgccaaccaaagaacccattctaccacggccatccaatgtttgttctaaagcaaataaccaacattggaccactttcaaatctgtctgtagattaatatttgtgaaaggggcagggtattttttatagtacgatatcatgtgtaagttttggcctattgtaaaatttgcatctactgaacttaaaatagagttaaaacatttatcgttatctggatgattactcagcatacatacgaagatctctgtagccattcttcttgtgtttaatcttgttgaaaataaacctcttgctatagtatcagtcataattgagtgacttgtaaattctctcaacccctgtgataacatagctaatactttgaaacatttaaaaaaactttgttctttatctaatagatcttgtgatagtttatgattattggaagaagacactttatagattgaattagtgaggacagtagccatggcaatgtgaccttgatcagccagaaatgcatctacccaacctagttgttcggttcttagagtgacccaaagatcattcatttgatcaagagtcaattgatctgcaataattttcttaacatagtggctaggtaatctgcttgttttatcagaagataaagattgtgaactagaattattgttctttagattattaaaaacgtttgaacttgatcgatggttattgttgttattatggcctgtactgacagtaccgtttttagttgaatgagatacaatgatgggtagagaagaggatgacacagaagaaacattagtatttctggaatttgaattagcagaagtagtcgtattgctagagttaattgatttactggtatgtgtagttacatgtgaacttaaagtcatattagatctctttctttgtaaatcacgatggttagaagaagatataggaatattatttggctgctgagaggtatgggttgtggctatattagtgggtatatttgaattattattattattattataattactgttagtgctgttgttaatgctgtttatattaggggtttttgacttaaacatattcttagtctttgatttaaatttctggaattcacttgtcaagtcttgtttgactatcagccattttttattgacgtcataatttaatagttctttttgtttctctggatccaaattagggaagatgtttcttttgtacattatatcaagaaacatatcttccacttctataggatccgaaggcatctcaggtacgacgaattggccatctgaatttaaatatttcgaataattgacaaaagtgtgatatgtagatgttgaattagaggagatattagactcatgcgacaatatactatttgcagaagacgaaagatttgattgctgtcgatacaacaatttatcactcaaggcagttgaatggctggaagatcgtttattggactgtatagactggttcctagaatgtgataagttatgtgcggtattggtattatttgtggagtgattgacatattgagataagttttgggagttcaaagaatttttcttatttaatgggttattaatattactattgctatccacagaatatcttgttggagatgaagatttgatagaattagaataactacttggagatttcatgtggcttgaggagccatttgtcattcttcttaaattctgaaatatactagatccgatattattgttgttattgttattgctgccgttgccatttgtgttattattatcattaccgccattgtgcatgctcccctgactactatttgaatttcttttcagcatagtttaattatgtttatgtttatatttatatatatttatatgtatatgtatgtatgtgcatgtatcagaagagtgaaaggatatggcaatcctagaagtcaaaatggaggttagtatattagaagaaaacaaaaaaaaaacacaaaaaaaccaaaaaaaataacaataattgtgatgacgatagcctaacaaaaagaggagaagtatgaataataatttaacgtgagagacctttaacaacaacaaataatctttgacaccttcgcaattgatattttaacgacaaacggataagctttcttaatacaaatgaacagaaaaaaattccattttcaagctttgtgtaattttttttatttttttttttatttttgttttgtttttattttgtcgtcttatcaaaaaataagaggaaacagaagaaaaagatgaaaaagaagtaattttggcatgtatttcctatttagtataaaatatccccaaaaggcaaaacaagaaaaaaaacaaaaaacaagaaagaaacagatcgtagagtgaagtgcaaacaatttagaataggaaatatttatatacgtgtagaggtatgttgataacatattatcatataacacaacggtacaacattgcctgtaggtatatataatattataattatcattctttctaccaacaaatattattgttcacctacacaaaaatacattgatttttagattacagagagaaactatttctacataaaaacatctctatatattcattattctccaatattatatatgtaattttgtatatatgtatatatgtatatgtatatgcatatgtgtgtgtatgtgtatgtgtatgtgtatgaaagatacatgttaatgattaattcttttttcttctatagtgagaaatactaaatagtgataataatagaaaaaagaaataatagtaataaggctaaacacgtgatgcgtaaaaaaaaattatatatactcatagataaaaaagaaaaaaaaatccaagttataagttttatataaatttcttcaagcaaaacacaacaacaacaacaacaaaaagagaaagaagacaaaaaaggatagttagttattagctatatatatatatatatatatatatatataagaatagaatgaaagagaaaggaacaacatgccaccttttataataaaatattttgattctgatccaacaacgatatatttaagatattggatacaaccattaatcaatgaaaacaatcgtacaataaggaataatcaaactagtagtaacgaaattactattcatttacctcaaaaaaatattatttgtttaaagaaacaaaaaaaattccataagaaaggtatatataattatgtaagaatttggaattttattaagatagataaattttcaatatgtggtatagttagagactctataaatctacaacttagttgtgttcaatagaaaatgtgtgagtgattttgaacgccgttacaacataagattgacagataagacaattcataggctaatggaattaaatattgtacatctggaatggtggcataaaatcgatattatcaaaaaattcagtttaaagatttataacgatctatctaatgaaacaaaaaacaatagtggtgatgatcctggtggtaataacaatggtgattttaacaaattctaccccatatttattgtggaaaaagtgacattaattgattcggaacggattgaagtcagtcatggtaaacaatatacattcacctctccatttccctctaataactgaaatttttcaactatgtacatctacataataatataagtatgtgtatatgaacgtaatatcatgtattgtgtgtattatgtgatatatatctatgcacatatagacagctagaatattataacgcaataaataccctttttttttgtcccttcccttaaaataaattccttcaatcgtgaacgtaagcagcaaaatctcacaagtcttgtcctattatgtgttgttcttttgtgtcttttttttatctagggcaattctaatgtctactattgtatgaaattttctcgagcctttcaatcctattgttattacaaccacactctattgtgatttcattgtgtttatttatccttttttttggtttttttttccaatggtaaaaaaaaaagtcacaaaaaaaacttttttttcttaaacaatagtttcttctttccccgatttatgaaaagaaaataaatacaaaagaaaaagaaaataaaaataaaaaaagaaagaatatctaattcccgattttattctttggctggtcgcagggctggaatgaaaacaaagaagaaaaaagaaacggacaaagggaagaaaaaaaaagataaaaaagcaaaaaaagagagaagctgtttggcagaatttgcttctcgagctttttgaaaaaaaaaaagaaggagggcagcgggtgaagagggggaaaataaaaaataaaaaaaaaaaaaatttttttttccatcgttattttgaatatatatgacggttttgtatttcattttcttcgaagcttataccttctccattgcttttataaagagagaaaaaaaattccccctccatttttctgaacacccaatttttgtccaattttccagtgtgttttgttctttattccttcaatcttttattcttttattcttttttttatttatcttgagcgatcattgaaatgattaattgttaccgtttctctcttcgttaaatttcttgtctgttttctattactaattcttggtttagcgtatataataatgaatgttttttgatatatacaaaaatagataactgttatgtgcatgctcgccttctacctactcgaacgcaagaactcatttaattgataaacgcacacacatatatacacatacacataatatatatagacagatagataaacatatcacatataattatggtaggtttctctaatataataaggtctaggaaagaccattcttcaacctcacacaacaactctacttctgacctagaatcaaataataacgaggatattcaatcctttacgaataatcatgaactacacactctcaacaatactgatatcgaagttaaaccttattcaatcgaatatgtccaagatatggatcaaaagtctaaattgaaaaaattatctggtttaaatagtaacgatattcattcctacacacaatctgcaggccagtctcagcatccagatggtctagacaatgacgattttgatgaacaattcgctgaagtccatgaaactaaagttaaaagagccctaaaacagagacatattggtatgatcgcccttggtggtactataggtaccggtcttttcgtcggtattgcatctcctctgtctaatgctggccctgtgggctctttgatttcatacattttcataggtactatcgtctatttcattactcaatcattaggtgaaatggctactttcatccccgtaacatcttccatcactgtgttctcgaaaagattcttgtctcctgcattcggtgtcgcaaatggttacatgtattggtttaactgggctattacatacgccgtggaaatttctgtcgtcggccaagttattcaatattggactgatgctgtccctctagcgggctggatcgcgatcttctgggtccttatcaccctgatgaatttcttccccgtcaaaatctacggtgagattgaattttggatcgctatggtcaaagttatcgctattgttgggtacttgatctatgcgttaatcattgtctgtgggggtggtccagaaggtccaatcgggttccgttattggagacatccaggtgcaatgggtccaggtattatttcaaagaataagaataccgccaaattcttaggttgggtctcttcattaatcaatgcagcatttacataccaaggcactgaattggttggtatcaccgcaggtgaagcagctaaccctagaaaggctgtgccacgggcaatcaacaaagtggtcttcagaatcgtccttttctatatcatgtctcttttctttattggtatgttggtcccttacaatgacccaagactatcttccaccactgctgttattgcttcttccccatttgttatttccattcaaaacgctaaaactaaagtgttaccagatatcttcaacgccgttgtcatggtcaccgttctatctgcagctaattcaaatgtctatgtcggttccagagtcctttatgccttagcacagactggtaatgctccaaagagtttcacatatgtcacaaaacaaggtgtgccatacttgggtgtcatctgtacagcagcattgggtttattagccttcctagtggtgaacaacaatgccaacactgcattcaattggttgattaatatctctacgttagctggattatgtgcatggttatttatttccattgctcacatcagattcatgcaagcattaaagtttagaggaatatcaagagatgacttaccattcaaggccaagttcatgccatggggtgcatactacgctgcgttctttgtcaccattatcattttcatccaggggttccaagctttctcccctgtgttcgaggtaagtaaattcttcactgattatatctcgttaattcttttggttgtaatatttactggatgtcagttgtattacagatgtcgatttatttggagattggaagatatcgatatcgattcagacagaagagaaattgaaaatatcatctgggaagatgatgagccaaaaaatattatgtctaagatatggaatatgattgcatgagcatcattcaatataatcctgatacatatcacgactgtagcaaatataataacaataacaataacaataatgataatcaataataatcaataaattcttatcagcatatttcaagactaatatattataaacctcctgatttaaccatgtaatatagatatatcgatattgatacagagatagttatcatatatcacctagttcttccatcatataatgtctactatatacatatatatatgtatatacaatttacctgtattttgcactgcgataaaaaaaaaaagaaaaagaaaacagaacagttcccgtagcatttatatagccctattttttgtgagatataaaccctaatatccgggtaaagttgcctctttctggacaattttgtttatttttggattctgttttgttcttattagaggagaagggccaaattgcctcaaaccttgttgaacatttctttgttgatcaattattgattgcattgttactagttcctccaattcgattattcgttatgttcaagctacatatacttttgcttgttctgcgtgcctatctacatatatatatgtaatggtttttcttgtatttggttttgtcaccttaggtctttaaaaagattaaaaaaaaaaaaaaaggaaaaaaaaaaagagtaactagagtatttcttaataagtctataactatatcagttgacgacttttgctactctataccatagatcaccacacctcactattatttcatttcttcctttcgacaattccattccattcatttgttagccactgggaaaaactctcctttaaatattctagtctaaattattcatttttgtatctatttcatttcgtttctagacataactaaggtatataaactatcaccatgaatatatcgaatccaaataacgaactcctgaaagcaatcaattctcctgcatttactttatacacatgtattgaattattatgcaaacatgctgataatattgggatccattactatctatgtcaaagattattgactttcccacattcagaaatacaattttatatcccacaattagtacaaattttacttactattgaaactgagtctatggctttggaggatctactaatgcaattgaaaaatgaaaatccacattttgctttgttgacattttggcaattgcaagcattattgaccgatctatctacagatcctgaatcatatggcttccaagtagctagacgtgttttaaataatctacaatcctcactatttaatactaatccctatattgatgatacatcaacacataatagcagtaacacaagcaatcctagttcttattatttaactgatgggagatcaacaaaaatgcatgaaaatgtggcacctgccattgtttatacatcaatgattatgagtgcaatgacgttcccggaattatctaacatgactaagccattagtggaatctcaaggtagaagacaaaaatcttatgtatttaaattggctagaaatgccatgaaagatttgacaaggaatctaacacttaaaaacacactattgaatagtaaaaaaaataggaaatataatacaaatgaggtgcaacataatatggatgataaagttagagcggctattgaggctaattcaaactatagatcgaaatccacatctactatggatcgtaaaagattaaaccattcaaactccatggtcggtagtcctatacttaaacataactcctttgatcaaagaagatcttcgtctcacgataccattaccacatctttgaattcaacttttgatataattgattcaacaatgacaagagaggatattatgtttaagaaaccaagaaaaaaagatgctattcaacaagcaacgttagattttagcatagttgatgatataggtaatcaattatttgaagaaaagatttccacctcaattaaattacccaaaagaaaatcaaagtttcttgcaaaaaatggatcttcttcaactgaaatttacaaaaatacagcaacatccactactacttctgatggagataatatagaaaggaaggatactgtaatttcaagtgatggagaggatgtttctgccattacaaataatgacaacgcatttattaatggtaatttatctaaggatagaaaaagtatattatcaaattacgaaaattttacaaaatctttaccagatctacataaagtaacaccatcaaagccatcaatttcttctaatttaaagaaaagtattttacaaaaaaataatataaatagttctagtagagacactaataacagcaatgattcaattagcacttctactactatcacaactactactgctgacacaccaagacatagttttgatgttgatgatataaaaactcgtcgtacattagtcagatctaatacgcaaccaccttctcattttgatatgatgagacaaaagaaaacaagttcttatctggctaaagaagtcgatatttctaaattatcaacaaaaaagaaaattaaattattaaaaacaaattatttccgttgtgcaacacagtttgctattgctttggaatctatctcacaaagattagcacaagtaccgactgaagcaagattaagtgcgttgagagcagaattatctttaatgaatagggatttacctgctgaggttgatatacccactcttttaccgccaaataaaaaaggtaaactgcatagattggttacaatcactgcaagtgaagctcaggtattaaattcagcagaaaaagttccatatttgttgtttattgaatatctaagagatgattttgattttgacccaatgagcgatgaaaatgagaatatcttgaaacataattctgctaatacgtcgcctttatttgatttaaattatttaagtaagaaaatacataatagaaatgattgggtttccttgatcccaggaacacaagaggataatatattaacaaccgattcatccacaatcgcaacgactgataccagacaccatcaacatcaagctcatatatcaaatattgaagagtattataatttgcaaatcacttctttggataatactataacgaaatatccacaacgtgaaatggatctcggtgatgtgtccatagttaaaatgaaaaatcgttcagatattggaacatatagaaatgatatcatgttgaatgttgctgaaaaggttcctattatagaatctgattcttctaaccgtagtccggagctgaagtttgttcaaaatatgaatgaggttatatctttagataatgagaaagatgtcaaaagtcagtttatgagccctaatgaaacagaagatctggctgagcaaatgagaatatcagcacttatgttgaaccaactagatcaatcaccacagacactttcagattcgacaaatcaaatcagagctcaaatcattatgtccatgaaagaagttcaagataaatttggctatcgtgatctggaagcaattcatggaaaggcaggagaacgtaaattagaaaatgatatgatgacaggtggtattgatacatcttatttaggtgaagattggcaaactaagaaagaaaggatcagaaaacaatctaaatacggtcatctagagaactggtcattatgttctgtcattgctaaatcaggggatgatttaaggcaagaggcatttgcgtgtcaagttattcaagcaatggctcaaatttgggccaaagaaaagactgacgtttgggtcaaaaaaatgagaattttaattacttctgctactacaggtttagtagagactattacaaatgcaatgtcagttcatagtattaaaaaggcccttacaaaaaaaatgattgaagatcatgagttagatgaaagaggaggtattgccactttatcggaacattttgttcgtgcatttggtaatccggaaggttttaagtataaacgtgcgcaaagcaattttgcatcttccttagctgcttattctttgatatgttatattttaagggtaaaagatagacacaacggaaatatcatgatcgacaacgaaggacatgtagtgcatattgattttgggttcatgttatctaattctcctggttctgttggatttgaggcttcaccgttcaagttgacgtatgaatacatagatgttctgggtggattaaatggcagtccatataaaaagtatgtgcaattgatgaaagatgggtttaaggcattgagaaagtattctgaccagatagtttctatgtgtgagattatgcagaaggataacatgcaaccatgttttgaggcaggtgatcaaacaagtgttcagttaaaggatagattccgtttagatttaaaaacagacactgaagtggataagtttgtggaaaatgatttaattggaaaatcaatgggtaatgtttatacaagactttatgatcaattccaattggttactcaaggtattttatcttgaatatactatgttcgaatttcaaggcagagaaagaatgaaaaggaaaatagttaaatttgagaagtttataatgatgaatatgatcatagtaaatatccagatatattagcatatatatatatgtatacatttaatagagttatatacgtaaacatagataagtataatgccatgacgtgtcagtttggaattaatatatagatgtattcctttactttttccaaatctttttctgaatagtacgaaaatgcgtaatagtagtactaattatcgacgtaaggctgcaaatcttctttttaactcttctatgtcagtatctgtacgtttagcctcattatcttttttagctgttgttggatgaataaactcaaccttatctctcatgtctttagataatttcaaagatttttggggatcctctgaagtcatcctagcatttcttacagtaattggatgtttttcattaatatttttatatgatgcatcattatcaattgaaacgataggtttttcagaatgggataatacagattgattagcactaatatctgtaacattatcaaaactattttcattggagtttgtcattttttcgttcgagttgacagtagatgaaatttccgaatcagaatcctctaatttactataaggaacttcgtatgtcttagcaatttcttgcaaataaagtataaccaacttttcaggtgggagttcagggatacattttttaatcactttttctggtacgccggttttattatcttgtaatgacttgataaattctctaccaaatttacacataagcaattcttttaattgagccaactctttaacttctggaacataaagtgagctagaataagctaatgctcttacagcctcattaataccatcttccatatgattcgataccaaatctagttcattttctattgaattgataatattaacccttgctagtaataattcacagtaaagttctagaatctctaacagttctatatgtatatcattagtgatcaaagattcgactctataataagccatttgttcttttccctgagcaagtagagtagcaacacgtcttctgtcttgtttagctaaggcttgttgtttttcttgtgcatatcttaaccgttgaacgcacattctaagacatgtctttaatctaatagggtatggaatatttgtgttcattttttgtagagatagtctgcaagcaacaactagattttctgcaactacttggtatttatgtcttatcagtttttgtgggtaattagcatgttgaaacgcctttatgaagttattctcataaaaagttaattatacttctttagaaatacagtataaatggtttttagatgattaatttgactaaaaggaatttgaggaacaataattccctaaacaggtaattacgttttatggtatattttaggccttcttacaaaaaaaaaatctctaccaatataagactaaatcatttaatcagtgtgtatagatattatcatattgaaaacatatattctctcatcattatttgtatgttctagtcgttttcatttaaaaagatcagtaaagtaattatatataacaacaaagtataaaaataagtaatctataaatctttcatataaatgtatacatcaattagtttattatttttttttctctgtagtagtttattttattctatttcactactactattagtactgaaattatttaagttttgtcatatcaaaatctacaggatacatcaattcttcatgatctccctttaaatcgaattcacttaatccaatagcacctccaaacttgagccatctttcatattgcacttgacgcatttcatcacaagccttaaccatatctggccagtacacatcgtgtttataggtgaaatctaacctaccgttgtacaaggcctccaattgctctggttctatatgcttttcaaatggttcatcgaagataaccttctcctttgtagcaggatccaaaaatggatacattattttcaagaatgcagagatataccatggtgcattgattaaaatacatttagctaatctttcaggataatgcctttccaatacagccaaacatgcctttgcgatagaaagtggtggtgctttatcagtgataacaccaggttctttataaaatttgaaatccactaacacagtgattgtttccacaccttgtggacagagagtagctgcattctccatcatgtagatcatatgttgaacttgtctaaacgatggttcagtgttttgtctcccgtttttcatatagaacagaggtcttctcatcttatcaaaccctaacaaaacctctttaccagtttcattttcaatagcaattttatcaggagatagattattaggatactctggatcatgagttaacccaacctctcttctccaacaaagagtcgtttttaagtggtttattgtctcctgtgtgttccatttattggcccttaaatgtcttaagatacattctctagtcaaccagaacttttcccatgaggacaatgaacgtagcgaggattcatcagtagtgcctttatttaaatcgtttgtattcattggtaactttaaatttggatcttggatatgtttcaagacaacattgtataatttgaactgttcttcagtgattgggtccaaaccagctggaacaggatatgatttaggaggtgctcgaagcattgtgctacatggaataagatcctttcgtgactcatttaagttgcttttggaactgttagtgctgctgtttctcgagctatcatcttttttccttgaaaagaaccccatttcttaagatttacgagtcttataatagcggcaatttccttatttgttgttactgtgctttccactcaaagctggttaagtttaccagtaaagatagagccacaatcgaatcttaatatgtaacaacatagagaaaaaaaaagaaagaataatcttttcgtacaaagatagtataataagtaagtgaagaaagaaaaataacacaagcttatatatattcaaaagctgggtccaatgccaaagttcatgtggttcaagaagaataaatgaacaaatacaaagcgcatctatgtatctatatatatatatatatcagcatatctgtggttttgtttggtgtcttcgtcaatttttcatgaagatttcaattcccttgcataaaataatgaactgcgctcgattaaaaaacgtcgatgccaaaaggggagaaaagaaatgaaaaaaagacgcattgtgtgctttttttgtgtcctcttcctattgttgttgccacaacaacgacagaaaaaaagatttatttcttttgttcctggttttttctattgtattttgtctatcttttttcgttcctccgtttttttttattggtgtagtcgtatttaggtctatttcgggtaccagcatgaatattttgctaatgagcgttaaaacagttagggtttagaaataaattgtctttttcttgtagcactctaaaggaaaaacatcgtgtaaagattttttgcccatctggaagtagatatctaaaaattggagctagtttttttttctttttttttttgcgcatgaaaactgtcgtattctgtagggtttatttttatatcattccccagccacattttgctaaaaacatggtcagtgaaaactgaaaaaaggtacttttatctttttttatttttttttttttttttttttgggttttgctttgtttattttgaaagatcatgtgtttaatgtttgagcccatcagttttattatgcaacatacaattgtacttcctacttcctacttctttcttttctattgtgagtcagttatatgacattgaattacaaaacatataaatcgattccattttaaacaagattggcgcagttataccttttgtatgtaatcagaataaatattctataggcttgtgactaacatgtttcacctaaaagaggttttcgtcctttctctctgttcttaaacacagcaatgctttttcttttctttttttttacgtaactgaatcttaaacaaaattatatgttataacagcaagtttatttatcagttatatacatatatgtttctttgatataattaataaataaatatataaacaaaaacaatgttttgtaatattataacgatctgtttattttttatgcttctccctatgccattagccacattaaaatgaattgccataaaaacccataaaagaaaaggaaataattacacttctttactgttgatttcttaattgagttaaccatcatagattcttgtgtattgaaaagattaaatttaatcgatcttaataagaaaataccaaacgtaataaaaagataagtcttcaataaaaaattgatccaaagggacttgaatggaataaacaatgttgtagtcaatggcacaaacttgtaacctacaaagcaagtcaattcgatgagacttgtcactgaagtattggatagatgtggtgtgttaaccaatagatataaccctaatttaaggataaacaaatctaatcccacaaatgctagtgtagaagaaagtttgtaatataaattttctggattaaaaacaccattcaaaccttgtttaatattccatacaaggatatatgtaattaaccccatcaatggaatgtacatatcgggagaattaatatcatcccttggaagagcatatacagttgtgttggctgcagcagcagatgtagagaaaccagaaacagaaccattggggtcgttcaaggcgggaacattggatgggtctataacgattctttgccaattattaatgttctttaaatatggaaacaataattgtttcaatttccatatgacaaatgaagtggagacttggaaatagtgagacaaactgtttgtattaccagctacttgagcagctttagccattgtatcatggaattggttaaaatttgaatttcccataaatgaattaaatgcattagatccaatttgaaatgccatagaggcactgccatccaaaaaggaagggtgaggttgtccatttcctccttgtaaaccttggttcatatagccagctgaaaactggtcaggttgttgtgtttgatgttgctgatgctgttgttgctggtgaacatttgaagatgtttggaaacggtcttggatattattattactctcattgaaaacggcagaatcaccttgtgaaagcgaataaggattatatgacatgaccaataaaagagaagaggaaactgcagtgtctaaaactatatgctcttggttcgacctattaagaataccgatgtaaatgtagtatttcaatatgaaagtacgaagggaagagaatcaagctaattcaatacatctgcacttttaattggactctgatctaaattgagttcattgatttttttttttttgcattattttttcaaattcatgtcatgtcctttgcatttatctatttattttttttttttgttgcagttgaaggaaacaaaaaaaaacaaaaaaaaattaatgtttagggttagagtgactttgtggtaaaaaaaaagttatattctaagaatattagtttagggtttaaaatatcgtatcaaaaaattaaaaaaaaaagtatgttgagttggcatatcctattttttttgtttctttctgttgtagaatttgaaataacttcattctgaaattctgctcagcaaacattttctcctgaataacctcctcaaccaagttattgaatattcgggagggagggaagggaagctgtgagagaaagtgatgttcgaaaagttttggtgatgacaatttaaagatttttcctattttggagatgtaattaatttttatatttcgcagattttataaagtgggaaaagaaaagaaaaaaaaataagagtgaaaaataaagtgtaaaattattatttctgattctttactaaaataaaagtctactttctatagagaggccagtgtcatttactatttaaaaaatagactttatatatctatatgtacctcccctccctgcttcaattactttgattggtttcattgagttcgtgccaaagtctttaataccttatcaggaacggcagtgcatctttattttattttattttattttattttattttattttattttattttattttattttattttattttatttttttgattaattgattaactataataaagtcataggtatatctaaatatactgcattcattattaaacacaatatttctctgtcaagctagatcatgtcagccccaagaaaacctattagttcttctgccaggatgctaagaagagatatgcctggaacatccacctatgccttagacacacaacaacttatacaatcaaataaaatcgatgaaattgattctatgatgggttttgaaaggtatatcccgccagaagaagcaatagtaacaacacgtagatctcaattttctaaacttaataataaacaaaccagtataaattataactcggctgcacaaattaatgccttagatatggagggacgtgtggggtggttgattaatatgcatccagtagtagtatctatggacactgtggcgagttccaattctgtagataattcaatcacacgcaagggtagagacgggaatcttttatcttttgcggttgctggtgtagacttttattttcttgatgaggaaggtggtagttttaaatccactttaacatatgatccatactttttcataactgtcactgatgattcaatggttagtgaagttgaagaatatcttaagaaattactagaatcatgtttaaaatctatcacagtcgtcacaaaggaagatttatcaatggacaaccatttattaggattgaaaaaaactttaattaaattatcttttgtgaacaataatcaattatttgaagcaagaaagatcttacgacctattttactagataatcaaaacactatgcaacagaggaatatatatagcaaccagcataaccagaatagtggtccatttgatgcaagaagatttattgaagatattagggaatatgacgttccttatcatgttagagtttccatagataaaaatattagagtaggaaaatggtataaagtgttgtcacaaggtttccttgaatgtgtagaaaaagtagcctttgcagatcccgtagtccttgcatttgatatagaaactacaaaggcccctctaaaattcccagatgcaaatatagatcaaataatgatgatatcttatatgattgacggagaaggtttcttgattactaacagagagatcatctctgaagatatagaagattttgaatacacaccaaaaccagaatatcaaggtatgtttactatttttaatgagccagatgaattggctcttctaaataaattttttgaccatattagagatgtacgacccacagtaatatctacttttaacggtgattttttcgattggccatttgtggagacaagagctaaaattcatggtttaaatatgtttgatgaaattgggtttgctcctgattcagaaggtgaatataaatcatcttattgttcgcatatggattgtttccgttgggttaaacgtgactcctatttaccgcaagggtcgcaaggtttaaaagctgttacacaagccaagttagggtacaaccccattgagttagatccagaattgatgacaccatatgcttatgaaagaccacaacaattatctgaatattctgtgtctgatgctgttgctacttattatctttatatgaaatatgttcatccatttatcttttcattgtgtactattattccgttaaatccagatgaggtgttaagaaaaggtacaggtaccctttgtgaaatgttgttgatggttcaagcataccaaaataatatattgttaccaaataagcataccgatcctattgaaagattttatgatggacatttgttagaatcagagacttatgttggtggtcatgtggaatctttagaggcaggtgtgttcagaagtgatttaaagagtaaattcaaaatcgatcctactgtgattgatgagttattagaggatttacctcatgcattaaaattttgtatagaaacagaaaataaatcatcaatggaagatgttaccaattacgaagaaataagacaagatatcatggataagttattagatttaaaaaataacaaaaagagagaagaatacccactaatttatcatgttgatgtggcttccatgtatcctaatattatgacaaccaatagattacagccagatagtatcaaaacagaaagagactgtgcaagttgtgattttaacagacctggtaaaacatgcgcaagaaggttgaaatgggcgtggagaggtgagttttatcctgcaaaaatggatgagtacaatatgattaaaagagcattacaaaatgaaactttccctaacaaaaataaatattctccaaaacaatatttaacgtttgatgagttaagttatgcagaacaaatgtcacatattaaaaaaaggttgaatgaatattgtagaaagaattataacagaattaaaagctctgaggtagttgaaagagaagcaatcgtttgtcaaagggaaaatccattctatgtgaatacggtgcgttctttccgtgatagaagatatgagtttaaaggtctagcgaaaacatggaaaggtaaaatggctaagattgattctcatgataaacacgctaaagatgaggccaagaaaatggttgtgttatatgattcgttacaattggcacacaaggttattttgaattccttctatggttatgtaatgagaaaaggttcccgttggtattcgatggaaatggcaggtattacttgtttgacaggtgcaactattattcaaatggctaggtcggtagtagaacgagttggtagaccgttggaattagatacagatggtatttggtgtattttacccaaatcttttcctgaaaattattttttcaaattgaaaaatggtaaaaaattgtttttatcttatccatgctccatgctaaattataaagttcatcaaagatttactaatcatcaatatcaagaactgatagatccaattaagcataaatataagactcactcagaaaattctattttctttgaagttgatggtccttataaggcaatgattttaccaacctcgaaggaagaagggaaaggtattaaaaaaagatacgcagtttttaacgaagatggatccttggctgaattaaagggttttgaattgaaaagacgtggtgaattgcaattaattaagaatttccaaagtgatatctttaaactgtttttagaaggggattctttagagagttgttatgctgcagtggcaaatgttgcaaacagatggctggatgttcttgacacaaaaggtgctatgcttgaagatgaggatttaatagagttgatttgtgaaaatagaagtatgtcaaagacattacaggaatatgagggacaaaaatctacctcaattacaacagcaaaaagaataggtgaattcttaggtccagatatggttaaggataagggtttgcaatgtagatatattataagtcataagcctgcagatgctcctgttacagaacgtgcaattcctgtagctattttttcagcggagatttctgttaaacggtctttcttaaggcgttggaccttagaccatagtctggacaatttcgatataagatatattatcgattgggcctactacagggaaagacttgcttcaacaattcagaagattattactatacctgcagctcttcaagatgtagacaatcctgtacctagagttgaacacccagattggctaaagaaaaaaatacatgtcaggaatgataaatataagcaaacttctctgtcaaaattttttaacaaggcggatgaggcaccggaatcaggtaaaattaaagatatcgaagacttatttagaagtaatgatacagaccaccaagatattaagaagaaatcagtagctagagttatagttactaaaacacaaaaacgtaaaaatatgcatgaatcaggtgacgaagcgcttgttttaccttccgtaatgccatcaatggaagaggattaccaatcatggctagaatatcaaaagataaaatggaaaatacaggcgagagatcgtaaacgtaaaacacaattatttggtaatattaacaataaatcatataggtctgctcttggatctatggttagaaagcaagcagaaatctatgctaattctacatgggaagttcttcaatataaacaaagtacagagccaggtaaattagatgtgtacgttttgattaatggtaaaattcaagttttgaatttcaagatacctaagacaatctatatcaagtgtaaatcaggcaatttacctcttgataaactgaaaaattgtttggtagaaaaaagcaatgctattcttccgaataacccaaatattccaaatggttcaatgaatttatttaaagtcacacttcctgagacagtgttcatggaggaaatggaagcatgtggtagtatattgaatggtgaaaatgtattaggtgtatttgaaagttcaataagtacggtgaacagagccattatcgagttgggttcttcagtagtatttaaaagtaacataatgggttccttgggtaaaggtttacagaatgggtttgatatgaaaaacttaaatatggttccgaatgaaagatacatgtctaaatttagtaatgactttgttttcattttgcattgtgcaacaaatattgggtatgaatttttcgttgtttctgaattgtgggatgattctgttacgatatttacattgaaaccatcaattcaagcactggaattaaatcaagttactttgacaaaaatatttaaaaaagcttttgaattacgaaagtcaaaaatacaacagtattcaaaaatatcaaacctatctgataaagtggtctttgatgtcaagaattacacagacatcgataaattaacaagacatttaactcagcaaattggtaaaattaaggaagaaaaggggcagcaatttattactcttgtacaatcacctttttgcgatactttaattagaaatgtgaaatatttaagaacgttacctgtgattagcatttcatcaagagaattgcagctgccacaattaaactggcaggttaagttatgtacaagtattgttggtcagcttctatcatgtagttctagaatcagtcaaatgattaaagtcgcccaatatagtaacattcctgtttgtaatattcaattaaacgacatcaattcagtgatagatattttgtatgctagaaagttaaaacatgaaaatattgtattatggtggaatgaaaatgggccattacctgacattggaggatttgagaagaattatgatgaaactctatcctctatgatgggggatcttactttcccacagatcaattcaccaaatatttatgatcaaacagtgttagaagtatctgtcagaaatttgactatcaatacagttatggtgtcttcattaattacagaggcagaggggattgatttagctaatgtagatatggtattaagtgatgaggttaatggtgatagttcgaattttgtccaagattccttcggttcagatgccttgaatgtattgaaaaatactgttaaaacatggtgggatgaggcgttagaagataatttcactgcggatttattagtgaattcatttattaactgggttcaaaatccttactccaaattatttgattgtgttttaagataccatatacacaacttgacacagaagacaattctacaattgataaatgaatttgattctttaggttctagtgtcatatatgctgataggaacaaaatattaataaagactaaaaagtattcgccagaaaattgctatgcttatagtcaatatattatgaaagcggtaaaagctaatcctgtgtttaaatatcttgatttgcaaattgagaaatattgggatatacttatctggatggacaagtataattttggtggtttggcatgtcttcaaattgaagctaaagataaacaagatatggatgcatattctaactggcaaattagtagcgctttacctgctatttatagaaccgaattcgatgattggatggttattatcttagatagtttattgaagacaaaggaaaactacctagaaagtaacattagcacccaaagagttacgcaattaatcccacaaaacttgatgcaagttaaaaaaaaagaagaagaatgatgatgatttagatgattcacaatgtatatttgcagattttacaaaatattttgccaaaccattgattaaaagaatcaataagttatacaaaaatcaaaaagagtttatattggatccagtttattcacaagattatcaattcccacaattgccaggttcctacttaaatatgaagaatcccttactagaatttgttaaatccatatgtgaagtgatgttattaggtacaaacacaacattggaagtcagacaattaagaaaggatttattgaaaatatttgaagttagagaatttgctaaggttgcagagttcaagaatccaagcatgagtcttgagattaatggatttatgtgtgaatattgttcatatttgtcagatattgatttttgtaaacagaattgggacagtaatgcgacggatgacagtaatagtggtaatagggggcccgatttaaacattcataatcgtttgaatagttttagatgcaagaaatgttctaaagaatatgatatcaccttattacaggaaagattagtttataaattattgcgtgatttttatgattacggttctcaagatttgtattgtatgaaatgtcatcgtataagagaggatttcatgagtccacattgtacatgttccggggattgggcaggtaagattacacaaaatgaattcacacagaagttgaaagtgtatagacaagtagctcaatattatgaattcaactatttagaggctgctttgaatgaaatacaatcctgatgaaagattcatacgcatatgcgtttgtctttatagattgtatataaaaaatatatgtaaataaactttttataaaaaagaaagaaagaaaaagaaacaagttagagtctatgaactattccttattatgttatttgcagtgtctataattcttttaccattcatgtaattggtcttgtttcactttaacttcggtaacctctttgtcctctacaaacccttctattttacctgcaattatactagaaagatcttcaacattattaaaggtcaaatggtttgttgaatgtttattatcatgattatctttggttaatctgtgaaaagataataaaacagtcctaaatttatttttcaatttaattagaattttatccaaattttccacattttcttcatcattattcatttgaatattgttaattaaatgtctaataatggaaatattcttattaagtgaatcattttttaaatctagtgaatctattatatcacaaatacctatgatctggtttatgaggacaaacctttgaaaccctacctgtaacccaaactgtttgccttctaagaaactgttgtgtaaggattcattttgaccctctctgaaaccttcttcatagtattgttcctctaattcaagtaatttatctgtataatccatcttccaaacctgaagtatcaccaaaagaaaaaaaaaaaagaaaaaaagaggcagagaaagagaagcaaaagtgatgataatgctgattatgacacctatttatttccgtttggatggattatcgtcaatttctagagtaagaaagtactggttaaatgatcatacttatttcttttgcctcttttcacaagattattaaaagatcaataacaaaaggttcaagccttcctttcttaagtatagagtgtttcatatgacacatctcagtccacgtatattagtaataactttttgtcagtgatgccttggagggggaggtattgtttccaccttcttcgcaaggaatcaaccgaaatttttgttcagttttccttttttttctatttgtttcatcttttctttttgaaaaaaaataaaaaaaaaaatgaaaaaacggaaaagaaaaaagatcacacccatacaccagcaaatttctattgtagtttttcttcgaggccagaattctatgggtgtatgggtgtacattcaaatcaaaagggaaagatcgataaatttgtacattttttgaatattttatctacataacgtatacataaatatagatggggtttataggaataatggcatgaaaatatgtatatagagttgtggggtagtactcctctctatattaaaggagtctcgatgactttggaacctgtcacttctttaccagtcttttgaatcttacttagtattgtttctaagggtaaagttgtttcaatatccactgtttgtttttttaaagatataacatatttagagacatctggttctaatcttttaagtactctatcaatggcattggaacaacctgaacaagtcataataacttcaaattggtaatggtttgtcatttgtgatatatatatatatatatatgtgtgtgtgtgtgtgtgtgtgtttatgtgtttgtgtctggtgggggggggggttattcagtgatcaaaatatggagttttttattctttgtttttaattataatgtaaagctgttacctacttttttgtatatatgtaatatatattgatgtattcatgatgtgatcatttcatcgctctatgtatcgaatagtcattaaaaggggtgcaccaattctctgaaacccacacccaaataaatagaaagcgtaagaaaacgcactttgggtggaattaacggcttcccttacatattaaattgccgaggaagcattaaaggtgaaaagaaaagaaaagaaaaaaactccttttttatgtttttttttctttcatttgctttctaaagtgaataattaaggatgaaaaaaaaaggcatgcacccaaatttgaatcggtgttcaatcctcgttggcagcctctcttatttcataaatctctgaaatagcatctttccgtagtggtgtatctgcaaataataaagtaatccatgcaacaatctcttccgtgctaaatagataaaattcaccattataaaacatttccataatatctttgaggtgaagcggtagaaatttactaattaacttgaatctgtcacggatctctttatatttaatcaaatttcgggtagggcttgacgctggtgataaagtttgtaatcctttttcaaagtaatcaatatagatattgttatggatcaatgtcattagttctgatagattctctgaatttttctctgatattatatcccatcttaatactatatcaataattgatttgttataaatgtaatccattatatccaaaatggtattttcgtattcaatagagaaactttttaaatttgataaaggttctaataattgtcccttagtgtatggtaataaatcgtcaattaaagacgaccatgaggggttttcctcatgtttttctagttcacttaattgattatttatcgctttcttgatatgaagcttgtgtttaattaatagtgttgttaaatattcatctgataatgaagaaatataagttagtttaagttcctttatagatgtatatttacaatcaatatacaattgccaccattcactttccgagtacgaactttggatcattacaaatatcgcattctgtagcatttgtaacttatgcaagtagtaatctctttgtatatcaactaactcatgacatttcttctcaaataattgattgctttcaataatgaattcatttattttagtcacttttattgttccttggtccttattttggaaatttatttcatcctcatcttcatttcctatatcccattccgcatcccatgcattttcatcctcgttcttctcttctctatcaaggggttctttgatatcattatctaaatcatcaatgttaatatcaatctcggtattccatgcatcttcaatgtcgtcatcattatcaatagaatctacattaggttcatctactggatcaattgctttttccaatttttcttgagtccccattacctctcctttgttgttatgagtattaccctccaatttatccagttgaataacatctttaatctctatccaattttggtttaatttcaattttttcttgaaaacgttaattgattcgttaaaattttgatcaattaaaattttataatataaatctttatcttcaatcaaattaatgatttcagacccatcaaaattaaaatttgggccatcggcagtcaactgaattagaccatcatttattgattttatttcatcaagatataaactgtttgattcattaaacaaaattgacgcagcattagatttaacaaatttaattaattccttaattattacctcacctatatcttttattataattgtattatattggcttgttttaagggcttgcaaaaagtcaactaatgatttgatactatggagtacaatctctaagttttcttcatcccactcttttgttgttattcgaataaaacttaatttgttattactactactactactattattattatcattatcattattggtggccttagcatctgtccccatattatattcaaatttaatatttgagttaaatatatttttcttaattaagttaactaaattattacatttaataaaattcaaatcaatgttggttaacattttcctaacttcttcagactctgaacaaatgcccatatcctttaaaaaccattcattctctaaattattgatgaaaaatagttgatttatcattgatataaatgtgttgtattccattttttcactagagtcaatcaatatttcggaattaaatataatagatttacaatctttaatatcaataacccagaacttttcaaatagtaatttatagatattttcaatgagtcttaaatgcatcatatcgatatatttcatgatagatctttgaaaagaatatgactgtcttgagagaattgtcttataactctttagtttatttcttagcgtttttaaggaataataacaattttcaaattcgaataactccaaattggcattaaattccattattaaatcacggaaagttttcaatttatttaaatcatccaattttattgttaactcgttatcttgattcaataaattggtattttctttaattagatcatctactttagaacttcctgtataattgtcatcgttgttactgttgttgtttttttcattttgtgtagaggctgtacacaataaaggatcctttgaaattaattctaagatagtctgcgtatctaaacccagcgataatagcataatattgacttattatttttttttattcattcagtttttggacgcagttttcgattaaataagcaaatgaataacactcgacttgatatagtcactattttaagtggtggttggctaattcaatcaagtatctattcaccttcaaaactatgttggattccaacataatgatcattttccacgatcactctgtaggttcaaaaaaacatcgaaaattgaaatagaaaagcgcgaaaaaaaactataatatcattttagacggtacagtaatcatgtgggacaaatgcatttctataaaagatatatgggtgtgtcatttatagacagcaatgcatttttttttcaatatagagatatacttttttttttttggtttttcgttttttaattatacatacgtacatactcatatttgtgcaattatttactagtttagattgatttgttggtttctttgttcgcttgtttacctttttttactactgttaatgcagggaagaatgttgatgaaccctgttgaaattgtaatataacttcatagttattcttttcattagtttcacgattttggatcatttttacaattttttccatgttgtcccttagacccgaagtggatcccagatatttgttgtaataatctaatgcttcctctttgactaatcttgtcccagtataaatttctccattcttatcattactctttatacctttaattattgtagtaacagattcttcggcttcgtctatttgtgatatcatatattgtttcattctggtcatctgtgagtgaaacattggtgtgtttaggctttctttaatcgtgaaacttttcaatatgtcttggaatatatcaaagcttggtaattcaggtacaccaattgatgaaaaggtcttaaatcttaggttatggagcaattcttggttaacaaatttacttgtcttaggtgccacaccatcaatcagtttgacggatcttaatatggaaaattgtaagacttggaataaactcaacgatttgttaatattgcattgcaataataaatatttcaaatattgtctgtttatctgcaactgaggcatttcttccttcatcaaacggttatattccatttttgaattttctttcttttcacctgctttcagtttcttgatttttttattcatggaatgaattgaatctatcttattctttataaactgagatattttattaagacaggattccagttgatttgaaatatgataaacatgataatacatatcaaaagcttcaaatggtttataaacttccaaatcaaatccttttaatgtaaattcgatcatcgcgaatactttaatagtaaatatccatgacgcatatggcattaacggaacttcagtattaccaacattgaaagtagtagtagtgatggtggtggtgggattattgctattgttgttattattgttatttgttgattttacaatatcatgcataccattagatatgaattcagactctaatgtttctaattgtgcttgaagagaatccaataacagtagaagtctattgtaaccttgtctgtacctagctgtattctgtgaacaattttgatagaattcatatagtacattagaacaatcctgcaagatcatcgataaactctcagacagattagggtgattgacgagattgtttgaaatttgtgcacccatcaatgaaaattccataaaatatgaatataacaaatcatcaaacgaatatttacctacaatggtgccatcttgatggaccaagaataaaggaaatagagctctagccaacacatgtctttgttttaacttattgaaaaaggatacaaattgatgcaactccactgcagtatcaattctggatacattaagaatcaatttaatgtcatttgccatggtgataaaccctaagtagttttttctctctggtgtcactatctgtttgggtgggaattggttagaacaaaacttttgaatgctcattgaaaaggatccctgcgggacttcaaatgatagatctgtttggttcagaattgtggctaattgaatgagatcatctaaatattgtgtgtctgtagaatattgagtggtgatattttcaagttgcactaaacattgaaccaattttaaaagattgattaaatgtcgggtgtaatcatttggattcagatcattggagtcagatacccatttgattgttttgtttaatgaatcaagaacatcactttgggcaggtaatctatcaaatccaagcaaccccattgaattgaaattcaaatcttcctcctcatagataacccgcttaaataatagggatttaatgaaagctgcaaaataggagatagaaacaataaaatcactcaatacgcaatcatataatggatcaccagtattaatttttttatctatatttacagtgtgagaagaattgatatttaacagatattccatatatttacagcttaaaagggtagttggtaaagattggtaatcgtttagccaagatacaatgcatctgactaatctgtcggctattgaagtgacatatattagattttgttctttatttgaaccatgttttatgttacaatcgaattctgcttcacatgcttttagtgggattaaaaaggaatccaatttcgggttattgacttctagtgaatgagtcccctgaaacaaatcaaaatatggatttttgatgattgttctaggttgcaatttatcacagagttcgtctattttagaagttatgtctaggagatctgtgttggcacatagagtatcaatttctttatcatttaatgataaattattcatatccatggccaaactcattgtgttggttggattttttcttttctatcttgttatttctcttttggttactcaagaataaaaaaaaaaaaaaaaaaaaaaacaaataatagaccaattggtagttacagatgtctgtgtgtttgtgtatctctgtgtttttagagaactatgtattttctattccatgtggtttcgagaaataaatatgaacaaaatgataaaggcacagagaagaagtatagggcaaaatggaaaacacttgcagaagcttctttattattagggttagtacatgcttcaagaagaaaaacagatcttcgtggggtagttatgttagggtcaaacttcaattttctttttcctgtctgaccatccagaaacacaatagacgtggaccagtgactagcgccgtgtgtgaggggaaagtgcagaaaagacaagaaaacaaaacaaagcccaaatggaccaagaaattttgtcgattttatgtttgctcgagagtttttttttcctgctggagggaaaaacccgactgctcgaagattgcagggaggcagggatggcagaaaacaggaaaagagtctcggagattaggaagaagatctaattcactagaatatttagctttttctacctgaacaactacgtggatctgaatatacataacatttgcgttttgtacttgtaccagtacagctgattattcgcaataaatataatcgtctctcagttgtttcaatcatctgtttttacatacagtacacagacaatctagtttcttttttactttcttttttttgttcttttttgtcttttattcttctattttttttttttattctttagtttcatggtaaaaatacatttctctatggaagagaataaattatcccaaataagagaagcacataaatgaatattatcacctcaaacacaatttgtttaaaacatttagttcataaatgtaattatacgtctaaaatatcactactcagactaccttttttaatacggtaccatacaaatgtctcttccctttcctcttcccctcctaacaaacattccattataactcctttgcaagaatatgatacacaaattaaactggggaaattaagagatgatccgtttcaaagaagtattctaacttttttaagtagatttcatagtgatttaattaattattatgcacctgaattgtcttccccatcgataaacagttttaataaatcaaagacagctaactggatgagtagactgttgaataaactcaaagtcttcaatcgctctgctacatttgattctattgctagtgacagtatcagtccttatagttgcaagacaccaaaaggtatttatctatatggtgacgtggggtgtggtaagacaatgttgatggatctcttttataagactatccctcctcatctgacaaaaaaaagaatccatttccatcaattcatgcaaaacgtacataaaagatcacatgagatcctaatggattatcacagaaacacaggcaaagatacaaaggatattgacactatcccatttttagcaaacgaaatcgcacaaagtgctagaattttatgtttcgacgagttccaagtcacagatgtggccgatgcaatgatcttgagaagattgtttactgttttactgtctgataaattcggcgttatccttttcgctacttcaaatagacaccctgatgaattatacattaatgggattcaaagaaaatctttcattccatgtatagaactgatcaagcataagaccgaggtagttaatttgaattcgaatacagattataggcgtattccaaggcctatttcctctgtctatttgtatccaaagaaggaccaatggagatacgagtctccagaatttaaagttatgagacaacatcatgttgaatcctggtacaaatattttgcgcaaccgatggaaaatgatcaactatctccagaaggcaatatgatacaaacaaaacatgagatccatcatgactatccgttaagtatctggggccgtcagtttattgtgcccaagtgtacaccaccaagagtagcacaatttacgtttgaagaactgtgtgggcagccgttggctgcaggtgattatttgatgttggccagaaacttcaaagctttcattgttaccgacataccgtacttgtcaatcgatattagagataagattagacggttcatcacatttttggatgctatatacgacaatgattgtaaattagcaacgactgcagcagatgctttcacctcgttgtttgttgaacctgagatgttattaaataactatgaattgaaaaggagtatttctgcatcaatcaatactgtggctgagcatgcagatgaacaagctaagattgatgcagcagttcaaaattcaacaatttttacactcgatgaggaaagatttgcgtttgcaagaacattaagtagactttcacaaatgagtaccacagaatgggtatctcgttaagtgaaggaaagaatgcaaaaaataaaaaaaataaaaaagatagagagagaaagaaggtagatatgttttttttttcatttttattggcattttccttcctccgttgtgatgtaaatggtagtgacttgacaaatgcgccaatatttgtacatatatatcaagtacttgtaaatatatatatatatatatatatgtatgtatgtatgtatgtatgtatgtatgtatatactgtgcagatgcgaataaatatattctaaagacaacagtaacactattactccattgaaatgctagaccttcggaatatatattagtaaaagactattcatctggattttttactacagtttgattctaattctggtttgtattcttttttttttgttttttgttatttttttttttttattagttagaggggaggagaaagtactactattatatttactgaaaaaggattgcatgtaggaaaagagaaaaattaaaaattaaaacaaaaagatatcgtgaaaagactattgctctttatttgcaaatacatacttcgataaacccccattgggcaggcaagagatatatacattagcttttcgagaaggatacaagaaaatatactttaatagatcaaaaacaattaatttatttcataggaaaccccccccccccaagtttattcaaaaggaagaactaataaaacaaaagtaaaataaaaatgtcaagtaatagagaacaagtgtttccgacccgtatgacattagggttgatgaaaatcaaattgaaaggagccaatcaaggtcattctttgttgaaaagaaaatcggaagcattaactaaaaggttccgagacatcacaaagaggatagacgacgctaagcaaaaaatgggtcgagttatgcaaactgcggctttttcattagcagaggtcacgtatgctactggtgaaaacattggataccaagttcaagagagtgtgtcaaatcaaagtaggttcaaagtcaaagcacgtcaagagaatgtcagtggtgtgtatttgcctcaattcgagtcatttattgatggatcgataaatgatttcaaacttactgggcttggtcgcggtggtcaacaggtgcaacgtgctaaagagatatatactaaagcagtggagactttggtggagttggcatcgctacagacggcatttattatattagatgaagttattaaagtgactaatagaagggtgaatgctatcgaacacgttattattccaagaactgagaatacaatagcttatattaatagtgaattggatgaattagatagagaagagttttacagattgaaaaaagttcaagagaagaaacaaaaagagacggctagattagatgcagaattaaaagctaaaagactaatgttggagaggaaagcagaagatgaaaacaagggggaaggggaagaagaaggaatggctgaaaatgcaaatgaagattctaaacttttaagacaggagagcgaggaaaaagaaacagtagatgaaaataataagcaggagacagttgaaaatttaattgccgacacagaggaggatattatattttaagtaaaccagtattggggggttactgcaaaacatatatctatatatttatgtgtatgggtaacttatcgtctaatgctgtataaaccttgaagatacagattaatataactaatagtaatgataataatattgtatatatatatgtgggtgtgggtgtgggtgagggtgtgagtgtaggtgtgagcaattatgtttatattaacttttttttcgcatatatttacatgattgaatatataatcttgtgcaatatcagtataacacacgataaaatagagtggaagaagaaagtagaaaggaaacaaaagtccaagagggtgtagtttatttcttgcctcttggtctatctttaaccttcattctattctggtttttacctcttcttgtcttataaccctttgccaattgaccccagggcgacatagataacttatttgatttggatttaccacgaccaccaccgtgaggatgatcacatttgttcatggcaacaccacgaacacttggtcttctacctaaccacctagaccttccggctttacctagagatctcaattggtgttccacattagaaaccacaccaatggtggcacaggctttcaaagagacataacggtgttcaccactctgcagtctaaccactgcttttttcttttctggtagtttagttagcagacgagcatatgtgcctgcagctctacagaatttagcaggaccgataggagtgataccgacgttatggatcacagtaccgatagggatcatttctaagggtaaacagttacctctttggatagtgtttacttgatccaataattccataccacgttggctttgactattagtactattgttgttgttgttgttgttgttgttgctgtatctaaaagattcaacgacgtcacctgctcttaatccgtcacaagccaagatatatgatagttttcccgtttcgttgtgtttcaatagggcgatatggccagttctaccggggtcgtattctatcctttgaacggtctgtttcccagggacagatctaaaaaagtcgaccagtctgattcttcttttatggaacctaccagatctgtgacgaacagtgatcctgccctggttgtttctgccgctgtttctgttcttatggacggttaagaaacggacaggcttacccttatggagatggggatagacggggtaccttagccaccgtaaggatggggagataggtttgaaagtcttcaatttgatggtttctttagccagtttccttcttttacgtagtaattcatcctgtttttctagtagtgtgatatctgaggtgtttggtacgatttttaggatgtgaggagtgagagaatcctgaagaagattagggtttgatgggagattttcttttgtatttgtgtctgcagtagaggtggtggaatagagatggggatggatggataaggatggtaagactttggatattaaattgtggtttgatggtctattgagcaaaagagatttattgaaaaatctaaccaacatagtattgaggaggggggggggttattcttttttgttttgaagataatagatgatataaggagagaaggagagggtaaattaaaaagaagaaggagaaggagaataaaaaaaaaataaagaataaggagtagaaataaaatttggactagagggctaaatgtcgatgggtaaatgattagtgttgagctgtgtgatggtatggttagtatactttgtatgtttcttattagcagaaagaaatacatacataatagaaaaaagaaattaagaaaaataaagtagtagttagtactagtagtgaatactatcttttattagttacaagataataatagaaaaacacaaaaaggaaggagacatacaatcagtagaagaaaaaaaaaggtcgatagaaccaaaaccctaactgaaaaaaaaaatcgaaaataaaaaacaaaactacatagaaggtcacgtggtatagagcagaaaagaaaaagtttttttttttttttcgtttttgctcaaatgaggcggcagacgttgtggaaggaaaaattatatataaagaggacaaggaagtgtagagtgtgcttgaatcgaagcagcagcaatatctgttccgtccttcagttgtagctgttgaaacggcttgaatcggtttgtttgcagctgataagagggacacacgtacatgtatacgtatgcgtgtgcgtatgtacatgcgtatgtatacatgtttaagtgtgttggtgtgtggatttctgtttatgttcttattatttcatttcatttcattttatattattttattttagtttttttcttttttgctgatgaccaaagttgtcgccccaagcggtatgccatttcttcttcccttttctttaattttattcaggaattatataggaagaaatggcagatgacagatgacaacaatcaaacactgaaaattctgaaagaaagaaaaaatgaaaaaaaaaaaaaaaaaaagatatatatgtatatagatatagtgtgaatggggacataataacaatacacacaacacaacgcgtatacgtacatatacgttgaagcatgtataacaatatgtgtatatttccttttcttccaaaaaagtcagaaagaggattggtactggtttggtccttcttactgcatatatatacccttgatggcacttttgctgttgtgttacggttttatatgatgaatgacaacatgtccatgctaatcatgatatgcaaaggcatatgtatttttacatgtgtttgtataggtgattattgaaatgtattatagtattctgatttattttaaactatcaagtagaaaagaaggtgaaacaatggcaatagtagtggtgatagtgataatgatagttctggtagttagtagcaattgatgttaaaaccattcatacactcatctgtgttgtttcttcttccttcttctcttgttcttgttctttttgtctcttgctttcctactccagtgtacacccatacatcttgtatacacacacttaatatatatatatatgtgtatgtctcggatcagtggaaaagtaaaccaacaataccatctgccaacaacaaaagaaagtcattcattttccatttaataatgacgttggagattggatcatgactgaaaaaaaagaaaagagtgtgagatcaactcgacgatcagtcatcctctcgataatcaaacttatggatggatggatggattgaaggataaaatactaacactatatatatatatatagagatagatagatagatagatagatagatagatagattgattgattgattgattgattgattgatatgtgtttatttatgtgtttatacacatcgcattgatagacttcttgcatcaggttcatctctttttctttctttttctttctttcattctaagtaaaagggaataaagaagaacaaaactaagggagataaaagctaagaaattatatacccatccacttacaacataaaaatagttacacatataagcataattattaatattattaaagttataagtataaatatttatttctatcgaacctctttcttactcattttaccctttttgttttggtttggtttgtttttaactttttatttcattctttctttcattaacacattatatccagataatgattagatatcacactactagtagtaatattcattcgagtatcctgaaaagatcatttttcttaaatggaatgaaacgtttcaattgctccactctatatcagtttaaaacaaataataatgaattctatatagcagataaacctaatgaacattaccaagccactagaccatcctacaaaggtaaaacattctctttacaagaccaattgccctctttgccagtgcctgatttaaacgatactctaaataaatatttggtctccattaaaccttttatccaatctcttccaaataataataataataataataataataataacagttacaataaatctaaatctatgtctaatgatattacagataataaggaataccaaaaacaagtccaattgtgtgacgattttagaaataatctgggcccaatcttacaaaaaaggttacaggaccactcctccaatagaagaaactggatgtccagttggtgggactcccaagcttatctaaactacaacgaccccgtcatcccttacgtctcctatttctataaccatgccccattgagctccttgacccattccgtaatcgaaaataaccctcttttcaaagctacagctttggttcaatctatcgtcaagttcatagaactgattaaagacgaggctttgcctcctgagctgatcaaaggcacccccttctgtatgaacagtttccatctgatgtttaatggagcaaggatccccaatactaacactaatgctaataaagataccgacacaagtgtcttttactctatttttgaaaataacttcattgtcgtcgcttataagggcaacttctataagatggtcacccacaacactcttgacggccgtcccttgcctgtgaatcttatctataaacagataaatgacattgttcatccagtcagaactgacaataacatcaccaacacacaaaatgactccggtgtgggcgtgttgacctctttgccaagagaccaatggaggtctcaatacctggaactgatcaaagatccattgtccaagagttcgttggagactatccatagagcctcctttatgctttgtttggatctagacaagagtccagtcaccttggaagaaaaatcaaggaactcctggcatggaaacggtattaatagattctttgacaaatatttacagttcttcgtcactgggaatggtaagtccggtttcttaggcgaacattcaaagatggatggaaccccaactttgtttttgaacacttttatctgtcaggatctaatgaaattgaaccaaagtgagttcttgaatgatattagcaaacctatcggtttagataatagtgaagtctcttctttctcttcttcatccacaagttatcaacctaaattattaaaattcactttatcgccaaccattaaaaactctattactgatgcaaaagctaaatttgactcacttatggcggaacatgatttgaacgtttggaaatatcaaaagtacgggaaaaatttcattaaacaatttaagatgtcacctgattcctacattcaacaaatcattcagctggccatgtacaagtatctaggcaaacaatttccaacttacgaagcagcatctacaagaaagtattttaagggccgtactgagacaggcagatctgtgacgcaggaatctcacgaattcgtctcaaattggtcaaacccaaaactatcgttgaatgaaaaaattaaattgttacaaaatgcaatctctgctcattcaaattatttgaagtccgctgcaaatggtcacggtatcgatcgtcatttttttggcttgaagaatgtgttgactataaacgatcaaagacctgctctattcgatgacccgttattcaactattcctccacttggtacatctccacatcccaattgtctagtgagtattttgacggctatggctggtcacaagttaatgatgctggtgtaggcttggcatatatggttaacaaagattggttgaatatcaatattgttactaagcctggaaagtctggtcttgatggtaaaaggattcgctattatttgaccgaagcagcagatgaaatggctaatgccttgattgaatatgaaaaactaaatgctaaagccaagttatgaaatgtgtgtcttctctttcgcttcttttttttttttttaatgacatttgaataccttcctttctttttattttttttgttccctttaacatatatacatatatctgtcgaagtaattaatgtttatttgctttttattttctttttcgttgcactaaaattgtttttcaatattttttttcaatagaggtaatcatttatattaatatttgatccaacaatcatgtaatattaacaagtggtatatgtataggtatgtaaattttatatatttagttttaattgcattgtgttcggagataagtaaatgttattcccagtcacttttttttatcaccgagtccaaagaagaaatctttttttttctttccattttttttattttcatctttagaacttcgcattgcagttcaacctacaagataaattattggtcaaaagatataagatcatctgttttaagggtgaggtagagttcaccctacacacatatgcttatatagttgacaattctataccttgagaggggaattccactccaatagttacatattctgttataaaacataactaaagatatttatttgttaccgagtgcatcaattgtgaagatcaaatagacaatttcacatcccttaaagtccttctcgaaaaatatcttcttcaaggaaacaaggataaatagctaaaaaaaaaaaaaagaaagaaagaaacacaaattacaaaaatgtctgccttggttagtttaaataatggcttgaagatgcctttagttggtctaggttgttggaaaattcccagagatatctgtgccgaacaagtctacgaagctattaaattaggttatagactattcgatggtgcttgtgactatggcaatgaaacagaagtgggtgaaggtatccataaagctatttctgaaggtatcgttaaacgtgaagaccttttcatcatttctaaattatggaacacgtatcacgatccaaaacatgttaagatggcattgcaaagaactctagatgacatgaaattagactatttggacctgtattatattcatttcccaattgctttcaaatatgttcctatggacattaaatacccacctggtttttacaccggtgaagaagattggaagaagggaatccttacagaggaacatgtcccatatatggacacttatcgtgccttggagaagtgtgttgatgaaggtttgattaaatctatcggtatctctaacaccccaggtgctttaattcaagacgttttaagaggttgtagaattaaaccggctgctttacaaattgaacatcatccatatttgactcaagaaaaattactggaatattgtaaaattaacgatattcaagttgtggcctattcatcctttggcccgcagtcctttgtggatcttggacaaggcttggctaagagcactttaccattgtttgatcaccctgttattaagaaaattgcagaagcccatgatgtttctccttctcaagtcattttaagatgggccactcaaagagggattgcaattattccgaaatcttcccataaagaaagattattaattaacttaaagattgatgaatctgttacgttaacagatgcagaaatccaagaaatctctaaactaaatcagaatattagattcaatgacccatgggattggatggattctaagttcccaatcttccattaaaggatggattgaatgtgtaaacagggttacatagatccatttatatataacacttaaataattttttataaatgattaatatgcatgtgaaagacataataataataaaaataaaaataaaacactgaaaagttcatgaataaacattgcttaaagagtttcaaatgatttcataacatatggaatttttatatataatttttttttctataatttatgaatcagctatatatgaacattccactatttttattcaatctgatgttaaatcaatgacatccgatgaatttttattattatttgaagatgcatttaccctaaacaaagaattaggaatattgctagtagtattactattaacaattattccatcattatatggttgattggtaattgggtttattataatattggaattatattgatcattattattgttgttgctgttgctgttgttgttgttgtctggtgaaacgtctttccttctcacagattcgttgttattgatacctgatcttttccgtggaagtacgtttagtggcggagggaattgttttcttggtatgaatggagatacttctgtcctagaccttcttggattagtatttctggaatgggggacagcaataggtcgttgattggtctctgaaggaattggaactgtagatatatttgaaaagttgttatcatttctggggaaggtattggctaacaaaggtaaaggtttcgtagaattgtttatggaggatggaatatagacattattattgttgctgttgttattgtttaaaaatggattcacaattggcggttgaatgttttgtgataaatttaacattggtaaattaccaccaatacctaggatattgttagaaccattgtcatttattgttggcgatggattagtaggtacaaacaaagaggaagacttattaattgatacattggctggtatactggaggtagatgattgtattgtagatggtatagtaagggattgtataggattagttttagattgatctgacagagtagtaagaacagggggtaatcttggattcactggattaactgatgtgtttatatttgtttgttgggtttgcgaaccatttcctaaccctaataatgaaccagatattaaagaaggtaccggggcatcgttagcattagtggaagttcttctatattgggataaaggtaaatcagcttcattggtttcattggtattctcaggtgattcattggtggagatttctcttgatatctcagttgttgtaggaagtactgagtcggatgtattattcattgtaagtccgtgctgtgttgtttgttcttcttcttcaccatcctcatcttcactgctatctaaggatataacaacaggttcatgaatatttgtgttattgtgactatcactgttgaatacatcatttgatacttctttttttactggggctgtctcatctgatccatcattttgatttgatctatcattgttttgtttcaaagcaacttcgtcttcaataaatggtttccatgacccatcagaagataactcaacttgttctacatcttcatcggaattttttaaaatttcatctacatattcagatagcaccagattctctaaaggtatggtgactgaacagacgggacattgccacgtcggtacttgtaactgtgaatgtagataccacaacgcatcaaaacactgtaaatgttggcatagacgtgattgagcggggtatttcattcttgtataagaaattggacattgtagacttagaacagtggaagtagttattaattcatcttcatcttcctcattcataatctttttaatataatttaaggtggatttcttagatatttttggatgtttaaatacgatattctgaagtaattcctccggtgagatgaattctgtgatgtaacacgccatttggaaatcacttgtagtgtaagcatagattaaatctaatgtatttatctgtggtggtggtctaatatgtggtgtcaaattggcgggttttgccgtaccgggtttattctttagccccttgacattatctgttattttgattccattaaataggatttcatttggtgatgggaatgcaattacttctttattatgataatgattatgtggattcgaatgatattgtgaggttgctggccaacagaataaataaagtttgtattttttggtatcattttgtagttttaaccattcatgaccagtaaaagtgaatcttactgctccaacacctcttccaggtgccttaactaatcgatatgatgatttcggtatttccatctgtatattataaaatgggggtaatttgaagggtacagaatcatttgttatttttttactatttgatttggaagatgatcttgtattggtgttagtattatgactattattggctggagtaattgtggttgttttggtagttgaagtttgggattgtatatttattccggcatctccaagtattcgaatgataggcgttggatatttcccactcttgacttcggaccaaatatcaaagtacgagggtaactccttggattgataaatcatttgaattaataacacgattgatttaggtctccatggatcaatatggcctattgacattgaatctttaatgaactggatgattctttcttgtaagtttattttacgcccagacaggggcaagtttgtacttctacataattcttttagctcggaaactttcagttgtttcatggcgtctatagcataattaatttccctagtcaacccgccattactgcttggattagaactagatgatgcagggggtgccataatatattatatcttctttatttgttgttattgcctctgatcaaattatattctagtcttccacaacaaatattaaataggtatttaggttagtgtgtaattattattaatactattagtgtactggcctggaagaaaactaaaatgaataaattaatcaaacacacacgattactaactagcaggaatcaaaagaaagagttaaaagtgacagtttaattagaagactggatttatgtatttatttaataaaaaaagaaagaaagaaagagtactaataataataataataaaggatataaacttttttgtggatacttattacttcaatagttaaccacgaaatatttcatagactgcatcacctttataacctgttggtgtttttggtataaaaattgagccatttcagatcgatttaatctctataaaacccacaaagaaacacaattgaatcgatacttctcagatcaaagatactttcaaagactcaaaatctacacatttccaatttctaacgtctaatttttgaaatttcattttcttctttttttttttttttgttttgtttttttcgttctttgtcatcgttgttttgttggattcctgtgtttttgtgtataaccaaacatagaaattacagtcacatgacacaataatatgtaaaagacccaatgcaattagaaatatattgcttgtcttctcaccaacattaccatcgaaacaagtgtgtagaaaagatgtgttgtattattatatcctgtattgatgtaagtgtttacgtgcttatatatatatatatagatatagatatatctctgtgtgtgtgtgctgaattatacctctattaatatttcttcctcctcaatgtcacaaatgttgtagacactttcctttaagattgcagttgtacctctagcaaacttgtaattcttttgtttttcttccctgatgttcggtgttatgtaatttcttagatattgggcatctttgcccacttccatgatacagacatctacattggaaccagatcctaaatcgttccaaataccggcttgaatggcgtcggatgccagttttattgcttcatctttggttatatcctctttccaactagcttccaacaccgccatagcagctaaggaaccggaacccaacgacaaataataaccaacgtcagtagatccatgtgcatggatagaaaaaagatgggacccagttggatcacagccagcaacgatcaaatatgcaccaatgtaaccttggtatttgaaaagatgttgttttaacatttgcaatgcagtgactacacggggctgtctcttggaggagagagcgtgcaattcaatattggaagcaatcaattgggtcactgcctctgtgtctgctgcggtacctgcacctgcgcaccatatccttggagcaatacgatgtaatttcgcacagtttttgtcggctacaataggaccctgcgttgatcttgtatctgcggcaataactactccaccattgaatttgacacctacaatagtggtaccggtagatgtggcctttggttgagtggaatggtttttagaagttagaaatgcgtttctttggtaattgtcaaatgataagcctgccatatctggagagtagactatttattgattgtgtggcgtatgtatatatatttaattatttatttatttaattatttgtttatttattattcctctcttctgggttttcgtcttgaaaagaaaaaagacagtctacaattcgaacaagcttggacttagaattgaagtaaggcgttggtttttttctttcctttccattcactacttcttcttcaatggtattcttcttgctgtggattaaacaagattgagttgcttgggttgctttagagaatttcggttttttcttcttagccaaaacttttctccctccgccaaaatctgctaggccacccatacaccacacctgttttgaaaagtttctcagattagtacttttttcctctttaaaacatacccttcctaatttggtaggtgtttcttttttgggaaaatggagaagaaaaaagggaagggaaggcagaaatttaagccaaaaaaaaaaaaaaagaaaaaaaaaagaataatttgtgttcataacaaaactaattatatatatatatatatgtgtgtgtgtaaatagtatatacgtatgcttgtatccatgtatgtaacatgtgtggtttggtgtttggcagtttcaggagtcactatgcataataataataataaaaacagaatttcaaaaagattgttttatgtcaaggaagaacactgtgagtggctaaaaaaaacattatagaaattaatattttctatcatgttgacaatattaataatgtctattatgtaaatagtttgatgagttaattattggaatagaaaatggcttgtttcggataaatttaaacacttggtatctttgagttttaaatcttgattaagttttgttatattttgttttgataaaaaactttttatagatgaagaagagaaactttaagatagatagaagttttactgtatcactactcaactaaaagtttatattagaatatattacatttttatgtctatatccttaaaacaggaatttttttttttcccattggacatctataaattttaatattaatttaaattttttctttagtatatatatatatatgtgtgtgtgtgtgtgtaatgtgatttactgaggaagtgtatcctttgatttgtctttggttagtgagagaaaacgacctggcacaggataaaaaaatatatcaaaaaaaaattatgtttttaatattttgggactaatttatcaaatttccgttctctttttttattttttctttccttagaaagtttatccaagaagcacatgactaccatatatatatatatattattcatataatattacatactttcgtttgcacaattaacagtttaactatggttctgtctattctcctaatctgacttcttaatgctcaaaaaataaaaaaataaaaaaataaaaaaataaaaaataaaaaaaaaatcttctatgatttaaaaaattatatatatttcaaaagatatgcttatactatacagaggaatggaatgttacatatttaatgtaaagtgttatattgtattgtattatgctatgttctgattttagtgcaatgaattactagtattgcgaataaatatatttatctcggacatactccaataatatgtgccttctagcaaacaagcctgatatctctattcttctttgttcatctgcccaattgtgtgcctgaattaaaacaatcataaagaattcttcaataatcatagttggtgtatttgcaataagttgacccgttgtactccacagcataccagttgcagcacatattaacccaatgataataagaacagatactaaaacactccactgtgtggaacaacatagattgacaaattcagatatcctgtaacttagagtcctcttatgttttggtggtacgaaatattcttcaggacattctatggatagcagctggaacaattcagcatcctcgtctgccaagtttttgaaattatcttcctcgtggttgatgattctgaagtacacctgtctaataacaaacccgtctaagaacccaacaagacctgtgtaagtcccaataatcaaccaccaatcgtctgaccagtgtaggggactcccaatagcagcccaagcagcaaatacacatatggcaattactatacctataccagtaccgaccacatctgcgtaccaatctattagatgttcagcattggtcctttttggtggttcaacagtgacaattgggttttcactagtgaaatcgctgtttgcagtccgtaatatcaaatcaatgttgcaatccatagaatgaatctttaataaaaatttggaaataaaaacgtcatgcctggctctaatgttttgtaagaagaacgaagagatcaacaaggagactgcaactgctgtattgatttccatttgccagtcatcactgaaggtttcaccaccttgtgggatagcaccacacccaatccacacaatgatacctacccagaagaggatcattgatggtacagaaccgataatccaagagaatgtagtacttaaccggtcataccaattttccacgggcaaagcaccagatatagtagtatcatcgatacgtggtgtatagacgctgacacggggggcattcgatacttttttaacttccataatgctatcatcttcatcactcccttcttgttcttgttcattcgcttctgctcctttttccttcctgatatgacaattattatcattattaacatgaagaacagagagtttattaacagaacttttctcttgcctatgaacattttccttgacttcttcatcagctttcaccaattttataggtatattatcgttggtaacaacaggatcacgaagcagaaatcttttgaatgaacgaactcgggatctcaactgtgtgacaatcagtacttgctcgtgtgtagaggtcaactgttgtcttgttaacaaagtatcccagaaataacattggatagattgaccatcttgcataacgacttgccaattgaatggagcgttgtagattgcacctacgatcacccatactataagaataacccacatcagaaaaaacatgacttgagaaccagcccacataacagccttgtctaaccagatgtccatgtatgatttctttagcccagtaaacgacatattcgtgtctatgcaaccgtttgcctgtaacaatacatctgccagatctaattttgtggaggaatcactcaaataagcgtcatcgtcttcttcgttatccgtgtgatcactaatgctaccacaattattgttgctactatgaccaatggtactggttgtggtttcgtttccaacaagtgtctccctagatgagttaagatgatgcatacggacatgtctagtcttgggatctaattgttgtatgacatcttgatcatgaggaatcaaaggtgccctatgatgcagagccggtctttcaccaggacaaccgaaaaatttacttatcctacccatcctggtttaattaactataatgcctaatattattttctttcttcctctcttgttctgttattttttgtagatattaaatcttaataatactttttttatttttatttttattttttgttatggtgatgtgtagaatataatgcgatagggtattggaaataaatatgctaagagagatatataaatataaaaagaaaaggataaaacaaaaaaaaaaaacaaaaagataataataataataaaagagttctgattaattgaatattgattcggattgatttaatatttttgtttcttttccttttcctttttctttccttttaagtttttttggtgtattgattcagattgatttatatcttttttattttaataactttgtttctttggttatatatagcaaataaacgacataaaagggtgctatatatctcatcaacccattgcataataggaagaaaaagaaagaaagagaaagagagagagaaagagagagaatatgattgcaggtgcaaattagaagaaaggagaaaaaagaaaaggaaaagaaaaaaaagttaattatattatagacttaattgagaaggatgtgtaacataataaacgaatctattaccatagaggtaattgccaagaagagagtgatgaagagaagcaaatgttattaggatcttgttagtatggaaagtctaacaggagggagacatctactttatagtctgagggaatgatttgactcgtaatagtcttcctcgtagtaatcttttcgagaaacagatcttgggatgttaatctactaacacacggaagacagaggtatctattggaaacgggtattcttttccagacacagaaaaatacaaaacaatacaaaacaaaaaagaaatagcaagattaaagaaaaaaaaaattttttttttttttttgaagaatattcttctaacaataaaaatgggtgcaattttctacaaaaaaaaaaaagaaaaagaaagaaaaaaaaaaagggaaaaggaaaaggaaagcactaaaacaatagacaacagatttgcatgttttgctcgctgaacatctcgatgttgctctattgttaacaacaaaaataatacaaaatatatatatatatgtgtgtgtgtgtgtatattaatcaattgtttaatattccgttcacccatatgtttgtatgtattgttatattcatggttgaatatgttagtcttttttttttaacatggctattacggaagtcctttcaatggaaaaaagaaaaagaaaaaagaaaagaattttcaaggacttaaagttattacctctgttacaattggaggattcttcacagggaacatcaagtagatatccactggaggtagtatttgtttatcttgtttttttttttttgtttttttttggtcttggtttcttattaaagaattgacaaaaaggattctcaaagagtagggtgaagagtaagattaacaaattttttttctttattattgatgttatgtatatatatatatataacattggtatcttaagactacaaagtagaaatatggtaaaaattttaaataatcatcaattagaaagttattcttgtaaacacgactttcaggttgcaaaccctagtatgtaaaaaaataaaaaataaaaataaaataaaataacctgcattattattattattattattattattattattattattattattattatttttcagttacaccatatccatttatcagggtgatgttgtggtaatacggtaaaaatgaaaaaacggggtagggttgatcagaaaatacaggaatgtattgaggaatttcttgttttctttttcttttccccctccctcacagaatccaaagcaatagggctggaccccctggcgtcgtttgtaataattatatgattaacgatgatggaaggaaccttgagcgattaatttttccgcttatttttttttcacctgactgattttgttctctttcttgttttgtttacaagaaaataaaaaaaaaatatatagtatagtataacataacgtagcatagcatagcatagcatagtataatatacaataaggcattttatctttttttgggtataataacaaataaacaatattcgcatttttgtataagcatacacaaacaccacactttatatatacatacatacatagacagatagattcagatatcgatataagggttatttaaatacataatatttatgtttgaaaatggattctaattatatgaggttagccctcagatggccagatgatttaagagagaaactaaaacaaagtcatcaactcttaaaagaatcctatctagaaccaagtcataaaattaccaaacccaaaaatacaaagattggtaaaaaaatcaatatccctggtatcactgacacatcactcgaaaattcaacagcaacaactaaggcaaaggtcaatccaattttcacctcgactgagtttacaagaactactttaaatgaaagcaccgggccaaagacttatgcacaacagagtaaagaaattaaagagttgcaaaagaaaatatccagacttttgcagcaaagagaattagagaaaacaaaacaacaacaacaacaacaacaacatgaactgaaaaaatgtttggatatgaaataccaatggaaaacacctcacaaattctataaggcagaagtattaggtattaagccagtccatatagtagaagattccgatattccatcggatagtgaaaaaagaaaggaagaaatctacaaagtttataaattgaaaaaacccattaagtcacagccagaaccggtcaaattccccaagagcgcgattctggagatcaaaaggaatgtcgatcttgatttttctaaattgatcatggtggccattgatcccagagcaagaaccacgaacacgttctattttgggtatttggtcgggaacaaattgtcggtttactgtcaatatttccacaaccatgttttatgcaactctaaaatcacgttcaaagatgcaaatgagttgaaacttaaattggcacgtcgctgtaggaaccatttaatgagttcacatggtgtggaatctacggtcgataaagcgaaattgcttgagacgataaatccattgaaagttgacatgttggtacagattcttttgtcaaagaggaaactgccgtgggataacgaaagagcaaagaaaattgaatcatccgttgataaatctggcaataaaaagaaaaacaaagaagaggacgatcaggatggtaagaagggtataatgaaagatgtatcaatagatttaacagataagactaaaaattcattgtcaaatgtaggtatatctatacgtagtgaggataaagtaaaaaataataaagatattatttctaacaatactgttcaaatagtgataaatgataggaatcaattaaatgagaagaatgggaaaataaatcccaatcttaaccttaaccttaaccttaatcctaatcctaatcctaatcctatagcaattattcaagaaagaagttatttacaattatccagtggtggcaataatcatattaataatatatcatttaatgataatggcaataatggcaataataataatatcatgaatactacaaataccatcattaccgattctaattctaatacacacaataacacaaatacttttgttaatacccaaggtggtataaatattaatagactaacgaataacgctacaatcgataacagtatccataataataatagtagcggtaacagtggaggtaaaaatattccagagactaacataataactaacacaactgccaacataaccgttgataacatttccagaaacacccaggttgataaaaatctaatatatcctgcaatatcatcatctccatatcagtcaaatactttacaacaaagaaatggcaactatccagattttcctattatagatgaaagaggttatcaaattaatactttatttaaaggtacttaaaaaatatgtcattgatagaaagtaaaaaagaaacaaggaaagtaaaaagggataaatgtaaaagtaaccggttaaaaatatgttacaaatcttctaattattctatttgggtttgtatctttttatttattatctctacaggtatcttttctttttttatctatggttttgctgtgtgttgttttttttttgttgcaacaaatacatttatatatatatatatatatgtatatatttatttatttatgtatttatgtatttatgtatttatgtatttatttatacaggtggttacagtatgagatcctgtatatagagatggttagagattggatgtactaatggtttagcatctcttcttcttcttctgtcaaagtcactgaaggtttatgttttggtccacccgcacaccgcaaaacttttacttctatatttttccttttcttcgtttttggttgatttccagttttctgtcttcgaaaagtttcaagaacagaagagttgagaggggaggtattggttggttgattagagtgtatcatactacatatacggtccattcagtctagtaatgctggtgaaagaaggtgtacttttattatttttggcctcaggcaaacacacgtacacataaatattgacttactaactctcttgtttatttgtaatttactggagggggagagtgtaagaaataacagctacttgttacagtttcatttcattttatcatgggaaaaggtatcgctaagtatggttacaaatctggtattttaccagtcacaagaagtatcctgaaaaaacccaccaccaaacaattggatctaattgctaaaagtaaagctgctcaacccaagggtgcacgtggtgaagggtacgctgatggtgtgcaacatcctccaaggtcaagcagggtgcctcccgctccagaattcattgatgtggagactttaattaaaaatacagttccgagaagtcataaagatttgcagattaatactgttgaacaaaggcagaagttagaaagagcacaggtacgtcaaagatatttggaggaagcctttagaaacgaggaaaatagaatacttagaagagatgaattgatccaaaggagaaaagagattgaaaaactggaacatgagagagatctgaaattgatcaatcaaaagaagtcttctgatttgactatcccgtccttggaacatataattaaccagcccttaatgagacaaagaactgaggaagagaagaagttgttggatatgaaaagaaaatataatagggacttagtggaattcaaatcaagggaaaataagattcgcaaattgttggagttatattatgtcgcagatgagtttatcgtcaccgaagaacaattgatgaaaaaattagacaatttaattccaattagaaaattgcccatatccgaggaaacaagaaaaaataatatcgagaataaacttggcgatgaattgtttggttctattaacggtaaacctggtcttccaatgattaaagagtacttaaacaatgaagcagaagaatttgcagaaagaataagacaacaaaatgaacaatcccaacaacttaattaaatttaacttatttttcaatctgaatagatctatatgcatatgtatatatgtgtatacatatatatggtgttaaatacactcttgtaaataaagtatacgaatatatatatatatatatatatgtgtgtgtgtgtgtgtgtggataaatgggcttacatattgtggtgattattttctttattcttttattgttctttttgttttaatttattcatcgtcgattgatgttatcaaagttatattatcaccttttagtaagattctacctagggattcacttttattaatatcttctttcccagtatctttatttactggtacttgacatgcatcgtctataacaatattcatgaattcgtcaaaccctcttatcttacctctgattcgatatcctacttgttcatatagccatatgcttacaggagtctgttgttgtaagtaattaaatatacaattaattggtggtaccacttgtctattcttatttgcggacatgatattaatctttatgcatatatatatatatatatatcggaatagaatcaattaaagttaaagtacaattggaatatatttctactcaatacagatgaaatcttgtttagtgattattagctcttaatactaatcatttactgctcttagtttatccttctctctttgttctctgcctgttttgtatgagactcttgttatatttttcttattttttttttttttgtaaaatagaattgaaaaatttcgaaaaaaataaaagaaacaaaagaagtaaaatcaatgaggatgtgaggatgattatggggttacaggtttattgtctactattattgtttaattatacaaaatgatttgcacaattcatgatcctggagatagttgttgattcgaataaaataatatacgtatttaattttactaggtttctactgagtttcaaatagataagaaaaaagtaggacatagtgaaaagaaatatatatatatatatatatacataagttgatcaattgaaatatgtcagaaaatgagaatgtttttattgtgattctcaattcaattcaatgcatttcctctaatgcaacacaagaagagaagcataaagccttacaatttatggaaaattttcaaagatctaatgaggcgtggaacgtatctactcaaatattgagcaataccattgacaataacttagatttacagatttttgcatcacagactttaagaaataaagtaacttatgatttgtttcagttggattcaattggtcaattgcacattaaacaaatgctattagatcttttaaagattcatacccacagattggttattactcaattatctgtagctttagccaggctagccattcagatgattgattggaagaatccaatcctagaaattatcaatcatttgaataatttccctggaactttgttgatatttttcaagattttacccgaagagacattggacattggttcaattccattaactgaagatgaatacaactcaaggatacacgaattaatcgataccatatctgaagacatcttaaaatttctaatatcttgtgtcaatacattaaaggaacaaaataatttgaatacagtttcaaaaactaatacagctgtagacataactttggagagcatattgcattgtttaagttcatgggcctttgaattcccaattgaaaaattcctaactgtagagcccctgattaatttggtatttgactctttgttgaatggttcagataacaatgaagtcttcgaagcagctgtggattgtttatgtattattctaaaagagagtagagatttagttaatgatgatctaatcatggccctatatggacaattgatgaatttacaatcgaacttaatacctcagattgtcacttgtaaggataaggaccaagcagaagatgaaatagatcctgaattattggaaaattttacaagattgtttgttgaagctggtgaggcttggattattcatatatctaaatccccagaagtatttcagccaatggtaatgatattactaatgttgacttgtaaaaattcagatctagacgtggttgcttatacattccccttttggtttaatttgaaacaaaatctcgttttaattagatacaaagaatccaagaaatatttcacaaacatttttatcgaattgataaagggaataattggacatttacaatatccaaaagattcatttacttccaaggaaaatgaggataaatttaaagaatttagatatactatgggtgatgtcttaaaagattgtgtctccgtagtaggtccagctaatgcattaactcctcccttagaacaaattaaatcaaatttaaacaatacatcaagaaatgaatggcaaaatttggaagctgcattattctctttaagaacaatggcacaagaaattccattaactgaaaacaaatttttgccacaaattatacaaattatatgtaaccttcctgagatcccaaaattgagatattctgctacattagtattgggacgttacactgaatggacttgcaaacatcctgaactacttgaaattcagttacaatacatattccgtggatttgatcaagtcaaaaacagtattattcaagatgatagacaaattttagaaattattacagcatcatcacatgctttaatgtatttctgttcagattgttcagggttactaagcgattatataaatcaactgattgatttttatttcaatattcaagatatcttatcaagagatattgagtctcaattcgagctttgtcagggattaagtgcagtgattaataaacagcctatagaaactgtagctagtacatttgataaattaattgatgacaatttaacacatttacaacattttattattcaatggaaaaattcaccatcaagttataataaattggttgctgatagaattgatcttttgtatgcactttttgaagaattatctcctagatttgaatatccccagcaaggttatgaacctttagtaccatgcattgagagaatatggaatacaatcagagttattatggttgatcaaggtgctatgactgatactgttattgtagagaggtctatgaaattgttaaggaggattattgaaaggtaccatgttttttgtgaacctattcttagtactttagcagattttttagttcaggaatatgctactactggttttgggtctttattatggtgttctggttctgtgattgttatttttggtgatggtgaatcgttccctgtctctcctgaattaaaggaagctgtttggcaatttgcgttatcacaatgtagcacatttattataaattttcaaaaaatggataagattcaattaaataattattatgaggttattatggatttcttttccatggtaagcgatttagttatgttttatccaaaagaattcattatgtctactgaattgttggataatgtggtggatgtggcaattgaggcggttaataaattggaaactttagatgcctatgtttatatcttacgttttctagatgatataatatcatgggggtttaggacacctccaatttctactatttcaatagagcttgtacctgatgattggcgtcaacaaattattcaagaaattattgttaaccgtggtgctaatttggttaattcgttgtttggcggattagttactgtctttaaagacacgtctcattcagaagcaattaattgtatagtcaaatgttttaggttgtctcttgaggctaatggaaatgactcatctgtctgtgcttcatggattgttaatgtagttaatgatttaggtaatgtatcagataaagagagagataatttattaaaatctgtaactgatggtcttaatgaaagaaattatagaaaggttaaagaaagcattagagtatttatagaatggtttttaaggaaaaatatcaattctagagttgaataaatttagatattagaaatgagctttatagataaagtgttatgattgatgttattgttttatttgtagcaatagatagcgatatagaaatactaaatgaaaaataagaatagaaagaatatagatatataagaatttaattttaatattataagggttattgtttttacacactgtgttgttttaatttttctagaacctgtggatatgcattaactatttcattgaatttttctggataggattgctgaaatatttctggatcactacctaatgctataaaaaacgtagcagtgcctgacctaataacctcagtagcaatattacaaatctgtagagcaatgacaaaggagaatgcaattagaggaccattgaaccctcctgtatcattataacttggcttggtaaatctcaagtataaaaaagcaaataaagcagcaatataacttacaaataatccataaaaagccaatgcagtattgatcaaattgtcattgattattgcatctaagcccttttctcttatcatttgccaagtttgtttagatgcgtttagataagattccccataaagggcaataaacgaatatgcgtaatgattgaaatattggactaaccattgtaaaaatcctatgattaaatcaataatccaaaatatgacatgcgatatatttccaaaattttgattgatcatgaacgcatttctaactaaagttaaagtttgtctgaaagtttcaattaaagatacaattaaagatccaaagcaaattgaaccaaaagatgttaacattgctcttttgaaggatcccattgcaatccatttaggtgtaccttggtcagctttagacataaaataccaacaaccatagattccggatattgtactatgtattacgtttttgataacctcagaaatataataaccacagaagaatacaagaactaataatccaattaatttggaatttgaacaactcccacctgaagtattgcagcctggattatttggatccggatcatatttcatataggttgctacaatgaccaaagaaaataaaatggcaaatgcacccgatattattgtacctaatattgaaacaattaaagtttgaggataagttttcattccatcaataactatctttaagatgatagttgccaatgggattcgacttcttattgaataaaaacaaaaggcaataaatagagtgaatactaaaaacacaataccagcggaccaatattttaaggatagatacataattgaagtgcctaacccagacagaatatttaatattatgccggatattatgaaaaatctaggatatagacgacaaagaaccaatccagtgatagcgaatactaaagaaatacaacaaacaaatatcaaaagaattgcagaatttgtattcatcgtatttgttgtagattttgtatagataccatgaccctgttgagaataattttgtgaccaagctcttaatgttagtgaagaaagtactatgaaggcgcaacagacaaaaataaagaataaagtaaatggccaatcattaaattttgaattatactttgtctttctcggaaaaacttcttcatatgtcatgataggtgcaccttcaacgtttgctgataaattataaataggattttgttcaaaatggtattcttgttgtgggacactaggtaaatattctggcacattgccattaagcgaactgttatcctgatttttattgaagttttcattatgtaaattttttgcaatagtgatcccttcaacaagatgattgttgttatcattgtgattattgtcactgtctttagtgtgagcagactctacaggagcaggggtgttaaatcttgagggcttttccttttccatgtttctgtgtcaatgttaagattaaaaagaataataaatgaataatatatatatcaagtattgtagtattatgtatgtttggagtatttttagctagaatatttttcgttatttttaatagaattaacttggtataggaagtaattgaaataaaaataaaaataaaaaagaccagtagtaaaaatattaaaaggaaatcatattaacttgtctatctttcccttcatctcgatcatatatattaaaagaatattggtataccttaaaatataagaactgtgaaattagaagaatgaataatactcgacctcaatttgaatccaaattgattgcttcctaaataagggttggcattatttatttagtttttttttttttaaaggaagacacaatcatataagacaaggtgaaaaaaagaggtttggaaacttcctcagccaggggagtgttcttaggtgaatatttgtttatatgcttttgttcagaacttttacagtgtaaatctaaaataataaatgattattaacagttagaaagcacctaaaaaatacttttaacggtcttaatataaaaaaaaatggttaaaacaaataaaatttatttggttgcttgttgatataagtaaagtgtttttttgtaagtatgatattaattatatataagtacttgcaaattgtatggttgttgattttaattagtgaatcaacggtacaattcttgttatcaaagaattaaagagataaaataaaaaaatgttaattttgagtaatattttcttgcactttctccctcaatattcaaaggcctctacaccaagtttttcagtaattttttgctggaatgaatcaatattcatacaaaaaataagtcatttctccatgcagaatctctttaactgagtgatttttcaccaacatgaatctagaaattgcttgaaactactcacaatgtggattcagagtttaggccgtatacactgtatgcaaatagagatgatatctcctttattgttaaaatatttcctttttttaaaaaaatatttgcatatatattcagataatataatattatctctacaatgtaagaaatctttaactttaaaaaaattccaccacaaaatattattctatcttacttaaatattatgaaagaattggaatacaatagttaacactaaaatttaattagaattaaagaaatggagtttaggttttttgtaatgattgtcaacaacatgttctagttggaaattcgaaattttaggatacaccatatgtcgcatattgaatgtttaagtgaataaaaacaaagagttcattaaatgaaacaatactgaaatgcttaagtacgaaaagtaattccactaaaagaaataaataaaaggataaacacataagtgcataaatggattaacaaaaaaagaatttgtaagaataattagtaattatggcagaatttatttaaaaaattattaacttccaattttatacataaagagtcactttgttagcatgttaataatgtgattgaggttagtttatcataagaaatattttgattatgtaaaataaaaaaaaaggaaacttattttaactttctatatataatgtatttataaatatttattattgttctgaatatttttttttttcaatattaacattatctagattatttttttagagttcaaattacaaaactgttgttgtaaaatgaattggagaaggattttgaagttaatgttagtgctataagattcaaataatttatatcatagtaatatcttatgtagtaatataatattattacaatctgtcggaaactgagagtttgttactgtcatttccatacaaattatttttaattagtttttctgtatattatgtgatgtacggatgtaccataatatatgggaaaccattttatttttcaccaaatatgtttttcacagatttgaagagaaatgaaaatcttaaaagaagaatcaaagtatataaaagaatttatactgtatacactatataataagtatatacatgtatttaatacaaaaataaaataagcatctgtaacttaatgatatctgtcattaccatggactttgacagttccaaattccaaacctatctttaattttatgtattagtcttatttctttactgtgtgttgtggaatagaatagttataaccatcaagattacataagatcctgaatgaatctagaactatttattgtcttaataagccatacacgtgctacaacattagatgctgcataataaagagatcggattacataagattttggcaaatctagaatttaccgattgttttaataagtcccacgtgtattactaatcaccatgattagagaattggggtgcagttctaatccactagtgcacctaaattaatgtaataaattttagggtgaatcagtcaagtcattaatgtactaatctgaataatcgatcgagctccagaaaacatataaaaggacaacgttttctggagataaaagatcatcttccataaccgtttcttgtaaataatttatatattatatatgaacaaaaatagaacaacaagcaagtaacaagcaagtaactttgaataaatatattagctcgatataagccgctcaatatataagaccgttttagtaattatattatcgcctataattgattactgtctcgattacttgaatgactattaatattatttgcgctttcctggaatacacaaagaatttcaccacctcatagtatagcactgtgtataaccggttggtttcgtggtctagttggttatggcatctgcttaacacgcagaacgtccccagttcgatcctgggcgaaatcaattttttttttgcagtaaagggaggaataagaatattgctattgattaaccaaaggtatttatattatataattatatatattagagcagtttacaaaagctgcctttcacaaccaaacatatagtgacatataagaaaaggaaccttttaaacagtatcattcgtggaaatgtcatcacgttatagagtagaatatcatttgaaaagtcatcgaaaagatgaatttattgattggattaaggggttattggctactccttttgtattacatgctgtgtctcatgatgaagaagataccgatgatttgacaacatctcaaagaattaagtcgcaatatgcagagattttgaaagatgtggaagaattgattctgaataagattgaatttgacaaaaaaaagtcagacaatgacgaggaatatttgaatgaatcttcattaggaagatcacggttaaatctcttagttccatcaattggtacatttttcacaccattgcccttggagaaggcatttctatgggaggattcagttaaagccatctctgctagaagaatggtagcaccaagttttaatgatgttagaagattattaaatactgcacaaatatttcactttatcaaacagaaacggttgggtcccaggtatggcaaacctttgagattggtcacatttgatggtgatgttacattatatgaagatggtggttctttggtcgctaaaaatccagtcatccccttgattatcaaattactaaaatataatatatatgtaggtatcgttactgcagccggttacgatgaagcaaaaatatatgaaaaaagattagatgggttagtgaaaactattaagcaatgtagtgatctaacattagaacaaaagaataatttaaccattatgggaggtgaatctaattatttatttcgttattttgaatgcgatagtgatagagcagatacagaaacagatggaacatacagtgatgcaaatagaaaaacatgtggattccaatatattaatagtgacgcctggatattggattctatgagggagtggaaagattccgacattcaagcaacattagactttgctcaaaagattttgaacacattaaaaaaaaggttaatgttaccggaagaaacaacaatcattagaaagaaaagagcagtgggcattgtaccaggtagaattgttgatgtcgtgtctggagaagaaaaagttgtaaagcttactagagagcaattagaagagatagtgttaacattacaaagtaccttagaaaattacccaccagcaaagagaatccaatttagctgttttgatggtggaagtgatgtctggtgtgatattggagggaaaaatttagggatttatgttttacaacgatactatgatccgcaaagcccaatagatccatcacaaacgttacatattggtgatcaatttgctccgatggggtcagctaacgattttaaagcaagattggcaggttgtacattatggatagcatctcctgaagagactgttgatgttttaacaagattaacagaggattgaagacgtttcttattttaattattcaaattaaaagtttttaaaattataggattctttaggattatttttcaaaactttcaaaagttaatagttgcgaattgaccttaggtataatacagattgctatacagttagataacattagctttattatttaaatcgaatttaaggcatttagcaaaacttataagaatattttcagttaatgttgggatttttaaagcgttaaaatacatgatactaacaggaaaaaaaatagtatttctatttgttttgatgttttagcccaacaaaattatattcatttctgaaactgtttaaattaaaatggtattatgtactgaatatttagaattatatctaaaaatatatatataattactccttcttgatcttagaattctttgggactcttgcaaggtagtagaagaagatacctgcaaggtaattaaatgcaatgtaacaaataaaaataccccaatttctccacctattagaatagtgactactgactgttgctaaatattcgtttgttgaagaaaattgacagaagtgacatacatcagtagcatccgaattagttagataaccggctcctgtcattgttataaatggtttcatgtattcaccacatgtcattccattagctggggtaaattgtaggagttcattcttactgcaagtaattggtacattggctacaccaatggcaagcagaccatcaatcaaatatgttaaaggtgatactctatacatgaaaatccagaaacgtggcatagcatctggagtagccatcacaccacagaaagataaagacatagtgaaggcaagagatgctaggttggctgcgttggcagcaacttcattgaatgaaacagctaaaagacccatggaaccaacgtatacaaagaaggccactgagaataaccagaataaagctcctctttcatgtaattgatctgcatatgaggcattagagtagaaaccgattggatagtaatagataaagaaggcaatagtaccggcaaggatattccatggaacttcagttataatttgagaaacaataaatgccttccacgagaatgttcttgatggacgttctctggcttcatacaaatctctttgttggacaaagtttggtaggtattgttgcaataatggattgaaaatacatacaaacatgaagatcgataacatttgattttgtaaaccttgcaacgatctatcggctttgaagaaagtgaaaccaatgaataattcatccacaacagttaagaagaatttcgaccataggtattccggtgatctccaatattgttggaataaacgaacagtaaccagttgaatttggtataaaataccagttgcaaattcagataatttctcatcatcattagaacgtttgccgggtagttctctctccatacgatctaattctgcatgtaccgctttgtattcttcagagtttctccatacttcatggtaatcttggtttgcatgagaaccgggagcagcaccaacaacttctaacatccattcggctggattagcatctggaggacatttaggagaaccatggctttcaaaataatcaattagtgtttggcatcctttacccaaatcaccgaaatacacagtcttaccacctttttgtaaaaataatagacgatcaaattcttgcattagaatagcagatggttgatgaatagtacacaaaatagcttgaccatggttggccaattttctcattaattgacaaatagaccaagcggtttgggaatctagaccggaagtaggttcatctaagaacactaataattttggtttggcagctaattcaacaccaatagttaatctctttctttgttccacattcaaaccttcaccggcaacaccaacaacggcatcagcatacttttccatctctagaatcttgataatttgttcaacataggcattcttctcagagatggggatttctttaggttgacgtaggtaagctgaaaatcttaaggattctctgacagtagaagttttcaaatgtaaatcttgctgttgacaataaccaatagatcttgggaaagattcatttcttggaacaccatccactaaaacatcaccagtaattacacccatagtaactctttcggctaaacaatccaataaggttgttttaccagcaccagaagaacccattaaggctgtcaaagtacctggtttgacccaaccgtcaacattattaagaatacgtctagtctcatccttaattttgacatcataacataggttcctccaatgaaatatagcctcagacttactcaaaccaacattctcatcactttcctcagaaatctcttcagattcatttaacatcttttgatcagtcatggagttgtcaacgttcttttcgatatcattgacatcttgaccatcctttttgattttaccctcttttttccattttctaatgacactagctgggaagactaaaatttcacccttttgcttagcaccctcattaaattcacaaataactaagtaaagaataaagaaaaacactgcgtatgcaacaccaacaccaaagcctctccacttatgcttgtgttcgtaaccgtaactagtcttgatgtagtcatcaccaagaacataatcttggcctgggatagcgccacgggcagaacatattctatcagtaccagtaatattggtgtaggcaggaccatatgggatataaagagaacacttatatctaacatcatggaattcattgatcattagagattcgaaaagataggataaaggattaatataccaaatccaagtggaccaacctaacatttttgtctttggaatagcaaaacctgtgaacatagctaaagctaataacagaatagatgcaggtaccatggcttcttcaagtgttttagtcacagaaccaacacaacggaaaagatgggacatggcaaaaacggcaacgatgttgatcaacagatagaagaaaaagacaccaccatttcttctaaagtccacaagaaaatagaacacaatattaaaacaaacagcaacagcagctttaaccggaacttcagaaaggatagatgcgaatgcgtctgcactaggatgatacaaggaatatgttttatgcttttctgtaattggtcttgcttcataaagagagaaaatttctaaaagacatgagaatgcattgaacaatatagcaaagaacatggcagcaccacggaaatagaaggagtttgtaccgcccttcttcataactttatagaacatggaacctaaaatgaaagccattgcagagttacccaaaatcataaacagtggaacaccaggattatttcgcattctccaaagatttctttttaataaatatctaacttgtaaaccataactgacggtgtatggagaatccggtctagctctcttagattgtttggcgacatgtgcctctttgataacattacggacgctgtcatcgttatttgttaatctatcatcgatttcttgtaataattgtttgtattctggagaactcaaccaataatcgtacatatcttttggagtttgtggaacaggaattccctttttaatatattcaggatttataattctttctgcgggacttgtgacagcggttaagaaatcagcagtagtttgtctatcaggggaaacatatcccattctttcaaaatattcttttgccttttttgcagaaccgtaataaatttggtatccaccatctaagacacaaactttatcaaataaatcataagcgtcctgagaacattgatatatagcaacagaagcagcggcattagagatagtagcttgggtctttagagcacggataaattctaaagcagtggcagaatccaaccctctagttgcattatcccaacattgaaatttagacccacatatagcgacttcagcgatagaaacacgctttctttcaccacctgacacacctctgaccaaatcattaccaacttttgtatttcttgtgtgagaaagaccatatgtagccatatacacttcagttacgtgtctagcccatgcgtctctactaacaccttgtattctattttgtggcgtctttaatctggcgacagtgtataaagtttgatatacggttagatgaggcaaatgaatatcagcttctgcattgtaaacgacctccccacggaaatgttttttaatatcctttggtgaaagaccgctgtatgatattgtggagtccttacccacgtggaaaccatgtgtattagaagaaatagattttaagaatgttgtacaaccggaaccgggtctccccaggacaaccatcaattcgcctggatctagataaccattcattggttttagaatctggaacaaatcttcttcctttgggggtcttgccattctataagctgcggatagcattttcccaggcatatttaagactgtagattgatattctatatctgtagattcaccggatgcagttagatttttccaaacacaaccgaaagaatacggtttataatactcagggtcagatgaggccaatttagccatattcttgacccaagctacagaagaaaaattactggatgttgggtctaatttttcattatagtcaggttggtcgacattcgaaaatacgggatttatacctagattggaggatgctatggaatgggtctcgtctattgaattaagattgctttgacttgttatagttcttgctagatctcgtacttgttcttggacattgctatcaaaaccttgatatggatgttcaatagattcagcagaactgtttgcagttgattcagattcactaaatgaattatcctttatatctgagcgaagagacatgatataatggagttatataaaagataattgttttgaacggtaatagtaataaaagtaataataattataagtatactcggtttcttatgtttttttcttattgacttgttgttataatttatatagcgtgtgtatgttaaaaaatagacagtgtagtgttttgctttgagaaagtcttttgatttatatatatatatatatatgtatataagtacgagtatattacaagaatacagacaagaatatgtattatattgatctatatattttgatttgtactcctgtctgtatcctttatatatattaaataaatatagtcattttaattaagtcttcgaaagcctgatgttagttagctaccgttattttcatcattattgtcctgaaaagaaaaaagaattttctgtttgatgaagatccgtgggagtagccatgcttataaaagaacaatatacgttttaatattcggactgatatctatttccgtggaataaagattccacggaatgtatattgaattttttttttgtgttatgttgtgttgttccgttcaataatcaaatatgtacacacactttttcttttttcttttttcttctttctttttttttaatgcaccctatattaaaaaaaagaaaaaactttttttaaggtaaagaaaacacgtagaaaatgagatcctatgtgatgaccgtactcaataaattgaatatttctttctttcggggctttttgacataaaccctattattttttattcaataaaacaaaagaaaacaagtgaatgaaaaaaaatttttttaattgaattgttttttgttttcttttttggagaaattttacaaaagaatgcatgcaagagagtgagttgagaaaggaaaagaaaagaaaaaatagggaaaaataagaaaaaatatattgtttctaaatttagttgatgctccttgccttcttctttccctccttccctttttttccataaacaagaacattgtttctttgtttgtttgttttctttacacaaataagaaaattttaaataaaagtaagtgtggagaaaggagaaggggggggaaagagagtgagagaaaaaggcgacctttccgcggaactgttttccttctacaggaaagtccataggtcccgcggaaagtatatacaaggtttgaatcaaacccattatatctgataaaaagaagattttaatgttgatgttggcaccttaaaataagtgaataaaaaaaaaaaggcttaggaaaatattccaataataattacacgtatttctttttcctttttttttttttcttgtaatacatcttggatattgttgttattattactattactactgttattgttatttgatttaaaagaaatctatggtaatttgttacgattgggacagctaattattgaaataagaaaaaacgtaaaataaatgctagagtagggaataacatgcaagaatattgaaaaagccataaatgcagaattctttattatttatttagacgtatttcaagataaaaaggaaaaaaagaaaaaagaaagaaagccaattatatatacatatatctttctcaagttaattaacacactttttggtaagcaagtatctaatcattatgttaaaaaaaaaaaaatgattgttcacggtaaagatgctttagttttatttcctggtataagttaatcatggaagaggaatcaaatgtttaaaaatgagccgagatcaaataaatttcggtattctgggaaagaaagaaagaaaagaggaaggggaaggggaaatatatacaggggagaaaaaggaatgttaattcttaatttattccgtggaaatatattgatataaatcggacgttaaaagatggttctttttttttctgttatcaagacgactttttccctattttaacggagaaagtaaaagaaaagaaaagagaaaaaaaaaacggaagaaagaatgactcaatttttttccgtggaaatcactcttaaagaacattcggttccgtggaaaaaatacccaaacgattttcttaatataatataaaataaaataaaataaaataaaataaaataaaataaaataaaataaaataaaataaaataaaataaaataaaataaaataaaataaaataaaataaaataaaataaaataaaataaaacggcaggaatttcaaactattgttattctgataaatttggatttcttttttttgattttataatcttaaaaagatttaacaaatatgtattgttttttatttttagtgtgtggcgtttacttttattcccttattgttttagaagatagaaaaacaaagaatcctttggaatggaatctctccttaatatttgtatgtgaacaattcagatataactctttctattagttatgatatattaataaaatacatacaaagaaaaagaaaaagaaaaaaaaacttgtttgaaaacatgatgtagaatgttgatgttattgacatgatcttatcttctcttatcttattttatcttggctttatttacgtaactgtcacctttattttgttttaaacatgatatcatttttctgtttttgtttatttcaaattgaactgtgttttcatacctttttttttcttttctttttatccaaaagggcagaaagaaaagctaataatagtgtatcactgttattaaaaattatcatttattataatgccacaaatacatatttaacataaatatgtcattagtgaatatcacaatattgtttttttatgtattattatttcgctatatagtgttattcgttcatttaatttcttgttggcaaatttgattattttaaatagttaatattatcaatacctctaataataaaatataataatgattttgttcttgttgaagaatcccgtgtcatttgagagatattctaagggtaagtaagagtttttttttgtttttttatttatttatattaggtttgatataatttacccacccatttataccaaaatttttttttttttcttttggaataaggaacactttttgttacaaaaaaaatataaaaaaaaaaagaatgaaagaaatataaacaacacaaatcatcatctgtaaaataaacaaatccaactttttttttttattttattttttttgtaacaaaattactacataacagcagatcataagaaaccttattttaaactgttattagatagtaaattaaataatttttagttgttgaaatatatacaattagaaatatctttaatgtaatctaaactcaatgtatcaaataacttgtaaacgttataagaaattctattgataaacattcaaaaataaaatgaatttcatcttgatactccagttatatcaaataagagatctgaataaaataattaaaactattacattatacattttcttgcagattttttgacaagaataaaacgtctccagtaactaactatattactgattagaaaaaaaactaaacattatatatgtatatgcatgatatgcttcaatgagtggttcctcctctccttctcactctttcttaaaatcacataaaatactaaaataagtttaaaatctatgagcatagacttataaagccaaatattcatccacaaataaacattttttaaaattaattgagtgattatctctcgacaatactaaaaaaacaaaaattttggaatattcaattcaagttatgagaaatatttccttaaaatgtctaatttttttgactttttaatttgaatatcttatacaatctacactatctaaccctccttctttaatgcattttgaatcatacataaagttaaaagggatggagggaggggagagacgtctcatatataactaataatgattattttttttttttctttttcgaaaaatgaaaaatgaaaaaaaataatttcatagaatttaattaatagaagggggaacaaagatttgaactttcaagtgttaaacagagagtacatcaccttataaataaacaagaaaaaaaaaaagaacatttagtcctactttgggatattccaatcaaagtatatccaaaatcttttgtataaacctttctttttttttttaaaaaaaagaaaaagaaggctaacaacaacagattcagtttaaatcaccctgttcagatagatatcactttttcttttaagcaatttacccatttacttatttttatcaactatctcactgataataaagaacaatatgttatccgctatatcaagaagtctgcagtttgtatttggtgctttattaccgattcaaataacattagaggtcatatacttatctaaggactggccaatacctatgcttgaaactgcttcatatactttacaacaacaaagagaaaaattgtcactacaacttttattactaaaatattggactatatatggattaatatatttagtattacctaattcaccattctatttcatattccattttgttccgtttgaatctatcgtattatcagtactacaattaattagtttaaatgaaatattaaaccagtttagcaaatttattgaagaacaagacaaaattattgcttttttacagaatttggatgatccaacaaaaagtaaattttcaatcttatcaaatattatattcactacaatcaatttaaataataaagaatatattgccaccactttcctgtttggagactatacaaaactattaataacatatgcaagaactgtgctgttaccgaagactaattatattaatattgtatttgattcaatcattcaagttattacaatagtgaaattatacatacaaagggaacaacagaattatgaaaagttcaataaatataaatgggacaacactaggaccaggagtgatagttacagatataacgaaaacagtaatacttctaaagatgactgggcaaatatgaatgctaacaatgatgaagctacttcaggtgaaacatttcaagaaactttaaatagattttggactgcatttaaacaagaatacaatagaacaactgcaagttctcaaacacaaaccaataattcaccatcaccatcacaaacatcatcatctgcaactacttctggtacacagtttaatgaacaacaaacttatggcagtaggaagaatgccacccctgatgattatgaaattattgataatgatcttgattagaatttagaacactatttgttttttttttttttttttcatcacaaaataaaataaaacaaaacagagcattgaacatttatacatacactcatgcatgtactaatactatggcatcacttttatatgcttaactaataatttcactcctctttataaaattatatatttattatactaatagtattcctttacgaggggttgcgttgaaagtgataaaaagatatcactctatacggaataggaaaactttttttttgtttttacttttattttttttttctttgaatagaacattaaacataaattaaaaagtgaaagaaggaaagtgattgagggcgaaatttttagttaaataaaagatctgtaagcaattgacattagaggtttcagaggatcgaatattgtattttggctatagctacttctagtattaacactacttacgcttagttatattaacttcacataagattaaagagtccataggtcaattataactacatttattaccattgtcaatacccttctttttttttttatctttcaccttctattcctttttcttttgttttagtttgttttcaacaagtctcctagatttattgaagccttataaatattaagttcttaccatttattcttcctccctctttttatcctatagtaccgcaatatgtctaaggaaaattattatgaagatgatgaatatggatttgaagatgaaaatgcaccaatcactgcggaagactcatgggctgttatctcatccttcttccgtgaaaaaggtttagtttctcaacagctggactctttcaatcagtttgtagactatactttacaagatatcatttctgaggactctacaatgattttggaacaattagcacaacatacaactgaatcagataatattagtagaaaatacgaaattagttttggtaaaatttatgtaactaaaccaatggtaaatgaatctgatggtgttactcatgctttatacccacaggaagcccgtttgcgtaatttaacatattcttcaggtttatttgtagatgttaaaaagagaacttatgaagcaattgatgttcctgggagagatttagattatcaacttattgctgaagaatcagaagaagatggagaaagcggtaaagttttcattggtagacttcctattatgttaagatctaagaactgttacttaagtgatgctactgaatctgatctatataaattgaaagaatgtccatttgatatgggtggttatttcattattaacgggtcggagaaagttttaattgctcaagaacgttccgcaggtaacattgttcaagttttcaaaaaagctgcgccatctccaatctcttatgtagctgaaattagatccgctttggaaaaaggttctagatttatcagtcaactacaagtcaaactttatggtcgtgagggcagttcagcacgtactattaaagctacactaccatatattaaacaagatatcccaattgtcattatttttagagctcttggtattattcctgatggtgaaatattagaacatatttgttatgatgtaaatgactggcaaatgctagaaatgttaaagccttgtgtagaagatggtttcgttattcaagatcgtgaaactgccttagattttatcggtcgtcgtggtactgcactaggtatcaagaaggaaaaaagaattcaatatgctaaagatattttacaaaaagaattcttacctcatattacacaacttgaaggttttgaaagtagaaaggctttctttcttggttatatgattaatagattattattgtgtgccctagaccgtaaagatcaggatgatcgtgatcattttggtaagaaaagattagatttagccggtccattattagggcagttgtttaaaacattatttagaaaattaacgaaagatattttccgttatatgcaaagaactgtggaggaagctaatgacttcaatatgaaattggccatcaatgccaagaccattacttctggtttgaagtatgctttagccactggtaactggggtgaacagaagaaggccatgtcgtctcgagctggtgtttctcaagtcttaaaccgttatacttattcatctacattatcacatttaagaagaactaacacacctattggccgtgatggaaaattagccaagcctcgtcaattacacaatacgcattgggggttggtctgtcctgcagaaactccagaaggtcaggcatgtggtttagtgaagaatctatcattaatgtcttgtatatctgttggtaccgatccaatgccaattattacgtttttaagtgaatggggtatggaacctttagaagattatgtaccacatcaatctccagatgcaactagagtttttgttaatggtgtctggcatggtgttcatagaaatccagctagattgatggaaactttgagaacattaagaagaaaaggtgacattaatccagaagtttctatgattagggatattcgtgagaaagaattaaagatatttacagatgcaggtagagtttatagaccattatttattgttgaagatgacgaagaattaggccacaaggagttaaaggttagaaaaggtcatattaatagattgatgcaaactgaataccaagatattgaaggtggttttgaggatatccaagaatatacatggacgtcgttactaaatgaaggtttagttgaatatattgatgccgaggaagaagagtctattctaattgcaatgcaacctgaagatttagaacctccattagaagaaggtgaaatggttgatgaattagatccagccagaagaattaaagctgttcaacatgccacaacatttactcattgtgaaattcatccttctatgattttaggtgttgctgcatcgattatcccattccctgatcataaccaatctccacgtaatacatatcaatctgcgatgggtaaacaagccatgggtgtattcttaacaaattataatgttcgtatggacactatggcaaatattctatattacccccaaaaacctttaggtacaactcgtgcaatggaatacttaaaattcagggaacttccggctggtcaaaatgctattgtagctatcgcatgctattctggttataaccaagaagattctatgattatgaaccaatcttctattgacagggggttattcagatccctatttttcagatcatatatggatcaagaaaagaaatatggtatgtctattactgaaacttttgaaaaaccacaacgtacaaacacgttaagaatgaaacatggaacatatgataaattagatgatgacggtcttattgcaccaggtgttagggtatcaggtgaagatattattattggtaagacaacgccaatctctccagatgaagaagaattgggtcaaagaacagcctatcattctaaacgtgatgcttccacaccattaagaagtacagaaaacggtattattgatcaagttttagttactactaaccaagatgggttgaaattcgttaaagttcgtgttagaactacaaaagttcctcaaatcggtgataaatttgcatctcgtcacggtcaaaaaggtactattggtattacatatcgtagagaagatatgccatttactgcagaaggtattgttcctgatttaatcattaatccccatgccatcccctcacgtatgacagttgcacatttaatcgaatgtttattaagtaaagtagcagcattatcgggtaatgaaggtgatgcatctcctttcacagatatcacagtggaaggtatttccaaattattacgtgaacatggttaccaatctcgtgggtttgaggttatgtataacggccatacaggtaaaaaactaatggcacaaattttctttggtccaacctattatcaacgtttaagacatatggtcgatgataagatccatgcaagagctcgtgggccaatgcaagtgttaacaaggcaacctgtcgaaggtagatcaagagatggtggtttaagattcggggagatggaacgtgattgtatgattgcccatggtgcagccgccttcttaaaagaaagattaatggaagcatctgatgctttcagagttcatatctgtggtaattgtggtttaatgtcagttatagctaagttaagccataatcaattcgaatgtaaaggttgtgacaataagattgatatatatcaaatccatataccatatgccgccaaattactcttccaagaattgatggcaatgaatattaccccacgtttgtacacagatcgttcaagagatttctaagcaaaattgatcagtatgatagctggatcacattatttgatatcccatgaatacatataaattgcctcacttatacaccaataatgactagttaatagaatgatttcacattttttatttttaccaaaagaagaaaagaactattatattcaaaaatattattatttaatatcaaccatatacataacatatataaaaaagaatgtttcttactacgtacaaaataataaattacaatgtactttaagtcggttttaatctatcgcaattagttatatacatgagtataagagaggtccatttaactttcacagagcagaatatataaatataaacatacatatattcaattatataatttaaataatgttctaattacaagaaatcatattgtgttataaacttaatatttctttattagatatatatatactaaccatcagtttgttcctttaatcttttctagtttttccattaccagtggttgttgattagcaaatgcagtaatattgtgcatatatggattttcttcaccatcaaacacttttaatctttctaatcgtattttacgtaatctgtttttgggtaacataccactaacagccctccttaaaagttcaccataaccttttctttcagcaacaacattcatgggagttaactttagactacctggtctacctgtatgagaccagtaattgcgttgttccatttttttaccagtaatttttaaattttgacaattggtcactacaacatagtctccacaatcttgagtagggtgatatacaggtttatgcttaccaattaatgttatagcaatggaacttgctaatctacctaatgttctattatccttggctgcatctacatgatgccatatgcgagcaaaggctaatccagtatgaccaatcttttgagacattctttgttatatctcgtatttatttttctttttaatattatattatatatatatatatacagtagtctacctctacaataagcaaaaaaaatatgttttgaaactcgttaatgaactacaaaaggagtgataattgttttttctaatctatgactcctcccccttcaaaagaaatattcttgtgttcccctttccatttccttttggattcttctcagttttttttattttttttaatttttttttcactcgctttcatattttttttatgtttgcaaatctcttgaagaaggcaaatattaaaggtggattaagattttatgaattctttaatctctatctctttctttcctttccttccctctccttttttttttcttttttttttgagaatcatccagatctatgttcttacacaagggataataattacaattctattgcatctatttttttgtaatctatacctatatatactttattatacacttaggacatctctacatcactgtaaccttcctctacctcacctacaccagacattagtacatgttccttcacgtcatccctattatttcgaatcgactttctgtattcactgttatcactattaggcatatcttcttcttcaaagtcttcttcgctactatcttctgaaatgccatcctctccatcttctataagacctgcatcgtctagttcttcattatattcaacatcatcttcatcttcaatgtctaagccgacctcttgttcctcatctccatacaaagtctcatcaggtgtgttatttatttttaacctattcaaacttatatctaaccttgtctctaatgctaatagtctgttcaatgtattgcctctattccttaatgtagaatgcaaagacgaaagtgtcttcaataaatttggcattgtaactaaatagccgccatggataatcaaacaccatttgacccaaacgttcaatgcaccttgtctatgagtttgtctggcgatcctttcagccaacctttctaataatatcacagagagactcggttttagtctcattatagtatctctaatgattctttcatcacgattatttaaggcattttctaataatgaatggtcattagactgcaaggcttgtgacaaaataattgtcactgtaccagtgactggaccttttttcttcgattttttacgtgtatcaccacccgagatagccataactttgtcagccaatgattcaattgcaatatggttttcttcatttaatctatcattttcaagttctttagtttcaagttcccaacccttgatcaactcttctacatgtttaaaattatcacctgcagtcacactaacattaccttctttatatgtaatcacagacgcaatatcttgtccatgtaaagtgcgatctcttgattggttgaactttttagtcgatatatttaaagatacaggattatcaatttcagtccattgtttccaaatcatttgatggaaatatgggattgtagcattttgtaaatacatcacatttaatgtatctttttgaataaaaatgtcaataattgggatttcgatgccattttgatcattttgcaataattttaatcttcttgaggcctgtttagattttaaggctcttcttttattagtattattaatcaaggggtcaacaaataactcaacgattccattctccgtgattactgcaacggctgtctcattgtcattgaccatcttaatgatgtctgattgtgcaacaagaacagacttagtggaacctttatctaaatcatatacatttaaaaatctatcattttgtgcgcctgaaataaaagtgtcattatttaacagtcttaaattattaactggagagatatggcctggataggtcataatacactctttggtaacaatatggatcaaaaaaatttggtgtgatgccaataacaatttttgatcggagataactaaaattttatttaattgagagcatccatctaatttaaatttattaactaattggaactctgttaaatcgaagtgataaatatagtcatttgaatcaatgcaccaaagttgtttatttgaaaagataaataaatccttaattttgtatgagttctcagtagatattttaacaacaatttcgtttgccaatggagaatataaccaaatttcaccgttatttaagccaatgaagacacataaagtttcgttattagataaaaaggaccattgtaaacaagtaacctttagatttgagttgtctaataataaagcgttttcatttagaagagaatcattctgtgttttatttactggttccacagatattttttgtttatccagtgcggtactcacataacataaatattgccctgttggatcgtattgtgataaaaccactggagaagttccatttgtgaaagacatggcttatcctgttgaatttattgtttctctatatgttagtccactattttaatatagcactgattgttaaaccaataagaaaaaagtaataataatagcgcagaagagaaatggatatctaccttatatcagtaacgattatctgaactagtctttatttgcacaaaaatggataacaggtggcacagtaacccaactactactgcttttgtataggtatatgtatcacacatccctctgattttcaatcaactctagaactttttcagctcatcgcttccatcgactaaaaaacgctaaaataaaaaaattttccatcctcgtccaaaatgatttttaagaaataaggcgaaaatatagtattttccataattgctaaagatttgatatgaggccaggtgaactgataaacaggtccataagtggtagtcatgacgaattacaagatcacttagacggctcagctaaggttaaatattaaattattgattgaatgaataagtgcgttggtttgggaaaaagtaataagaaaaaaaaaaaagaggaaaaaaccagagctacgaataacataagaaggaattttaagactgattttattttttgttctcctccttttttacatgcaggtctattgaatgattaacctagttattagattaatatcaacggaataaaatacattttgtgttttatttgcctaaatatggacagtaatttttctataagtttgaaaaagcaaagcaaggggaaaaagaaaaagagagtcaatgtgtttagtgattcaaatgaagacaaaagcgatggtttaaatcgactcgattccagctccttcacagtcaagaataaaaaaataaggcttactgaagttactgcagatgatttagtaacaaagcaagaaaagtcggaatcagggaagcctgcattagtgattaaattgaatgatgatataggtcctgctcatccagcacaagagctaactactatggaagaatataatactgttcctgtagaattgtttggtgaggcagtattaagaggtatgggttgggatggtaaagtaactgataataatgaggatgcaaatgacgaagtgaaattccaaaatgatgtgacaagactgaaacatccagataatgtagggataggtgcaacaaagtctaatgtgaaggttgctactagtgacttcatgcctattaagaaaattgaaaaatcagtaccgtccaatctacaacagaattaataggataataaaaaagaggaactataagttaatacttcaattagtattttaatgctgttaacaaaaaaatgtatactattatgttagaattaatgtgtgcattttctttttcatatattcatgtgtatacaaacacagggataaataagtaaattgttattttcatcagttacaagtttataaaatgcatatatctataacatttacttttatacaggagatgcaaatccatataataatagttgtgatgcaataccatttccccattttttcaaccattcttctttatttttatattcccattcttccacgattttaataagatcaacgtagagttccgtacttatttgatcatatataccagtctcttggaataatattttattttctaaacttttaaggttccttactaatctaactcttaaggctaattcacttgtattggttgcagtagtagtagtggtggtggttgtagtagcgttagtagttgggattgcagatacatttgagttataaccttcagttgaaatagatacagtagaagtccctttcttgctaatattattctctttctcttgaatattggtgttagagtttatatattgtttatgttttgaatttgaattgtttttgattatactcatatcaggatattttcgttttcttctaatagatatctctggtgaatcacgaaacagaattgtatgagcagttattttatcatcattattattgtcagataagctttgaaattgttttagtgccctttgtaaattaatataggatacaataggttttaattcgtctaaggaaacgagctcttcacctgttgataattttggtgggtttatcggaagaactgcttttaaatctttaaaaataaattttaaatcaatcacgatatatttttcctcattattattaataataatgctgttgttgttgatagaatgcttactgctaaagaagtcaagtgagttgtttagctcatcttcagtaggtaacatgatatctgccacaatatcaacattacctttttgcatccaattaaaggattttgttttataaaggcccaaatctttaatactgattgaattcaatcttaatctggtggttcgtttccaattacctaaatcattttgaatattattgtttgaatatccaatcttttgttgtcttttatgaaaagtaaataaagaattgtttattgaacccgatataacatcagcatgcaaaaaatctacaatcatttgattaaacctcaattttggaatctctaagttgaaaagcgatattttataagtgatggatggatccccatttgcataactttcattcacagtaatatttgaatcagctattttaatattattaagttggtagtaaggattagaaaaccaatttattagtaaaaatgtatccacatcatttttatttaaggcagcatttgtagtggaatcagtattaccaattgttggatcccttttgtttatattattatttaggtgtggatttggatatataatatttgttgtgccattcatcccatatattttaacattattaattaaacctttacccaaaagccatttttttagagaaagattcatttcaatttgttgaaaatttaaatcaaatgaaaaagagttatttgattgatctttagaagtttgcaaatcaacgttattaaatctaattaatccatttttccatttgggtatcaaagcatcttgaaatttcacatcaataccatcaatgaaataatttaacagtttaccaatagtttcagctaccaattctttagcaaaaattgtgtttgcagctaataataatagcgatacaaaggttgtggtctttaaaataacccaaacaacctgcgacagtatcaaccatgaaaataaggttcctagctcatcttttgaaaaaggtctttccttatttcttattagtatccactttatattagatttgaacttttgatataagtttaaatttgcattgatacttaattcactaatatctttattactgttattactatctttagagtgtattgggctaactattttagttgctgaattgttcttattttcattattagctgatattggattatatattgtccttgaaactgagataaatctattttgtaaaaataaaaatgatctataatacgacaacggaggtttgttttgtttaatttttacagttgtattatgttgaattcgaagtctagatgtgaatagatgtgtataagattggtttaatgatattcgatttgagaagtatggatttttgtggaagagcattcttcttgatattaagttagtccacatgttttactgttaggtttcttaccctctcagtgtctttttatttttatttccttgatttttttataatggttattgttttatcccaatatatatttatgtgtatggatatatacatattggtatatgagtgtacagctttcatctaaggtttttgaaaacatttggagataattaaatgctgatagttgattttaaagttatagtgtgggagaactatacttgtatatttagagattttgtttatttagtaatcggcttctttgctttttttaataccaataataatcattttttctttttttttattttttattttttttttataacaaatggggaaaaagacaaaaaaataaaagggcattcgcttctttaatttaagaattcttttgtttggatcaaatctgaacgactcgtttgtattgtttttttttgcatttgggttgtggaaatggaaaaatatgagaaaagaaaaagatttcttctttgttaaaataggtttattttaacagaatctttctttttttccattataaactgtttttttgttagggtatttctgtaataaactgttttttttacaacacgttaaatgttgatatttaatttttcaatggaacattttaataaatgtttacaactaaagtagcagctacatttctgttaacattcatcataaaaataagagcctaaacaagtaagaaacttttttataccaatgtagttttttttcaattttcttctataaataactcgtgttttttattttattaaacaaggaaaatagattgagtccattgttaagcctgcaatcatgttttcttttctccttgtcaaatattaatgttttttttttgcgtttttactggttatgtttcaaatatttataatatggctttacaagtatgttgtccattcttgataaaataaattcaagatgcttgattttataagctatttttatttctttttgaaactattcttaaaaagagtggggaaaaaagtacttccttgttgttgtactaaaggataataatggatggaccatgtcaaaatttgtattcatataaatattttcactgaggacattgttaaacttaagaaatactcctgaaattctattattaacttattattggttattatttctcatgtacaagtttagaaagtagttcttaatatttacattaaaatataattaaataagatgattatcccaggcatgtctctcaatcattaaaggtcttttaacaaggcttaataaaaaaattttttcccaacataattttttttagtaattttttatgtttacaaagcacaacaataaaaaaaattaaaataaagttttttgcctgttttctttatatactttatagaaagaataatcctctggatgaattatgttagtatacatgtttttagtgtcggtgatcatattagatgttattattttgtattcttaattattttaatatgtaaaataattttccctctatctcttatttgagaatcaataattatataaatataaaggaaacatacgacataacggatatatcgctgaaatcgaacgtgctagaataaataatagaccaattagattttagtacacattaattgataacaaaatgtaaagaacgtattgtttgcttgtcagtagacgtaaacaaacctgatcataaatttggtaccgtacatagacgagatagacgagatataaaaatatataaagccaacatttttttcatattatgtttcctcccttgctcatcttttatacattatccttgtatattacatataaataaaagaatcgaaaaactttattataattttgtatattatatatatctaatataatattgagaatgtttactatatacccaatgactacaagcgctcattctcaacagtagagtatagtttgtatatcatatatagataactgaactaagctatatttatcaattctagtgtctacaagaatatatcgctcgtaatagatcgtcatctattacaatatctctaataatccatctttggtaacaaagcattcgaaaagtgctttacacctatacttacaattacaatgtgattatgtgataaccctgaggttatgggtttctggcaacagttaatcttgttgaaatttcaataatatttcacttggatagatataagatatagactctttctatatttctagatgtaatattcctattgttgagaatgagcacctttattcattggatatatagtaaacactctcaaatattatattaaacagatttagtaaacaaaattataataaagttcttcactttctttctctatatacaacatagaaataataatatacaaagattgtaaataagataaaaataatgtatgatgaaatccttggctttatatatgttaacattaagccattttcctttacgaacagtaagatatttaataaacaaactcaacaacttttggtgacctctcaacaattattactcaacaatttaacgtttagtgtctgctaaaatcttattgttctatctatttcattatagaacattctatttcaacacctatatatccatatatctatatccttaatctatgataacttaatagtatacacttatatattatatatctaaacctatgtaatccttggttccttcgttacttccttgtacttatgttggctactcctgcttttatgtatgtttgtaaaatttagcaaaaaggaaagtttagaaaaatactgtcaactctcatttttctaaacataaccctaagctgtaatatctccaatattacagtttacagtaaaaaagggggcgagctgggaattgaacccagggcctctcgcatactcaaacgttccagtgaacccaaagcgagaatcataccactagaccacacgcccgaaaacgtcgtgacgtccgttgcagcattaaattgtcagattctttgtgtattccagggaagcgcaaataatatttatagttattcaagtaatcgagacagtaatcaactataatcaataatataattactaaaacggtcttatatattgagcggctttaacgagctaatatatttattcgaagttacttggcttgttacttgcttgttgttctctttttgttcatatataatatataaattatttacaagaaacggttatggaagatgatcttttatctccagaaaacgttgtccttttatatgttttctggagctcgatcgattattcagattagtacattaatgacttgactgattcaccctaaaatttattacattaatttaggtgcactagtggattagaactgcatcccaattctctaatcatggtaattagtaatacacgtgggacttattaaaacaataggtaaattctagatttgccaaaatcttatgtaattcaatctctttattatgcagcatctaatgttgtagtacgtgtatggcttattaagaaaataaatagttctagattcattcaggatcttatgtaatcttgatggttataactattctattccacaacaaaaggcatctgttttggggcacgtggcgcagttggtagcgcgcttcccttgcaaggaagaggtcatcggttcgattccggtcgcgtccagttctttgatgcacatgtaatatccctgttattactgtttagggttttgtttagaaaaatgagggttggcaatatttttctaaaatctcctttttttgtaatagatgatgattaattacgagatatatagtcttgtaaacactaaaagaaataaatatttcttgattggttgtctatatatgatatataaattatactctacacaagaagtaaaataacatatatagatatacagacaaacaaaaatgtcatcgtcgactaggaagttcacaagatactttatagtgacatcaggattctatatgtaacatatagactaagcaatatataatatatccttgactattttttcataattttttttttttggttattcttctttttttttccattgattactactaataaatattgtggcaatttggtgcatttagcattcatggtaatggtgaatattgttaagcaatagatacttgtcgttatttgatgttaaatatatatattctttatgtcatgtatttaatataaactcttttattcatttcaagtcttttaatgtttttcgtttttcttcgaatacttgaactacactgacggtaagagataaaatgttttctgcatatcatcatacatctgtacataatatgatatacaaaaaaaataaattacaacaattcttatagaaataacacaaataaattctcactttcgaacgtatatagttgtattttttctttaataatttatatttcaattgtcaaggctgattggaaaaattttacaaaaaggagagtttaggaaagtattgataatcctaatttttctaaaccagtagttaaaagtcttacatataaatatcttaaacattacggtgcttatttgtggtgtacaagtttgcaaaatataattatgagaaacgttgtcttgatatcactatagacagtcttatgaattttttagtcaataatagaaatcttattttttatatctataaatttcgtatctatccggttttctacttcttcatacaacttcctacatgcaatataatttatttgtcgtatatattttgtaataggttttcctttataataattagacaaaattaacaatgtatgtgtgcaagaactgtaggcaaatattctgtatatatatattttttctagtattttaaaactaagtataactaaaggctcatgaacaacattaatagcagccagtgattgacaatgtgaatatgtatcatcatgtgcattattatatgtcagtataagataacttacccgtatatataagcaaacccaagcagtctgtcctcttatgttatataacgttcaaaaattttttaaaataattttggagtctgagtaactttcaagaataaaaatacacttgattatatacatcattaaatactacttgtcttgagtttgttttctatttatttctttaatttatttataaatatgagaaagtcttcttatttggtgaaataggtatttttatatgaaacagagaataagtatcagaaattatgatagaaaattagctgttcaaagacagtagtaagaattagacatagtcaaaaagaaagaaacaagatgtggaatatatatattatattaattattcaatattgaaaggtagcattagtttaatattagcttacattttttgtaaataaggatagtaactcttaagaaaattaatatttaggaacgtacaatttgtaaagtagaatattatattgtttgatagacaaattgaaggaagtcgatactaccacaaatatatcaccgcaaaagcttatcataagtatataatcaaatttatattagaacttttagtgcagaattatattatctcaagatacattctaattattatatatgtgtgttataatcctattgtaaaatttaactattttattttagaatctttaaaattttcgttattatcaaaactagatatattaccgaaatattctataatatttgagaaaggattgtgcttttttttcttttttctgttctttcaaagacaaaacttacctagtgattaacaataaagagaataggaataaatcatcaagatcccaattttacttaaaattttgttttctttgtatacctaaaaatattgtttattttaatgcattatataatatttggttttttaattcttgtttttatatatattatatatataaaaaaagaaccttaatcgttaaaagtattaatcacttagtttacaacaaaattaaaattatacttgatacaacaaatttaacctgtgctattttacgatgtcaaaataattggcacttaaattttaatcttcaattaagatgttgtaaatataccaacctgatcaatttatctgtaaatgtatatatatattatctttatattatatatgatgattgtttttgcatcttttttctttcataactttcacataaattattttaagcctccaagtgaattaaaaggtgatctaaggtttatcccatgatttggatctccaaacagtcacactataagtccaaaaaagaacagacaacgtctctattgccttacttttgtactataccacaatcaaaaattctgcttactaaattatttaaaccatttgaaatatttataacttctagaatgatatcaatagttccttgaatattacatatttttaattctgtacatatatccatctaaaatattataatatcatacataatgaggatttctttttggatttctttctatttaaagaactaactgttttgggggatttatcagttttattcttaacttcaatggaagaatttgtttttgattgtgcagttcctttttctgcattctttgttaaattagacgtttgtaacctagatgtattttttgtctcatataattcagactggccttggtatgatcccattctagtattttttttagaagaattacctaacatttcctttttagaaagagattgtatggtaccatcaccattactcttattgtctttgaactgtgaacgacttggatttctcatttctgatcttgcaacattttccatttcatttcttatgatctgtctcacaacatcaataaatacctcatcaacatttgattttaataatgcacttgtttcataaaagggaaccttgccccatttactgctaactgctataccatcttctacactaattaccctttcatcgattaaatcagctttattgccaacaagtaccattggaacacgatctgtatctttaattctaagaacttgttctcttaatgccattaattcattcaaagactgtttatcagtaactgaatacaccagaagaaatcccataccagattttatatataattctctcattgcagtaaattgtgcgataccggcagtatccaatatttccagatcaaaaactttattatcaatttctattgttttcctatatgaatcttcaattgttggatcataagaatctaagtagataccttgcacaaattgtacagttaagcatgacttacctacaccccctgcacctagtacaaccagtttataatctctcatttttttttaatttcgctcactaatgctgcttagctaaatactttgtatattcttattttaacttattcctactttcttgtcaattgatttacaagctgaataaaaatatatatctatcttatgaacgtccacaatatcattgcatcacacgcatactatttcaaagctaactcttctacttttttatttttctttcttttgattttctttaaacaaaaaaaaaaatggtttttattttatcagaatttcagatttctaaaaagaaaatttttttgtaaaaaaaaacggaaatagaaaattccgcacaaacctgtattatttccgcttgtctcaaaggatgaaaaactaagaaaaacaaatagggttaattagtaatcatatatcagtgtcgttcttccctaccaaataaaaatcgaacaagaaaaatataagttttccaacatatttatcttctttctttttaatcagtttcatactctgagcaaataagtgacctttctgcaaactcatatactcttatctataaaaagatggaataaagtccttttatcttttttataattttttctgctattggactctttttctccttgaacctgcatttaaataagtagcttactaaataaagaaaaaaaggcaactcaacaattattaattttagtcacatccaattcgtatgcacacagctgagtttttagatattgaagagacccaaatctcatctattctagctggtggttacaatcatccactattgagagaatggcaaagtgagagacaactgcacaaaaatatgttaattttcccaatctttatatccgatcagccagacgacattacaccaattgattcattgcctaatattagtagattaggtgtcaataaaattgttgattatctacgtcctttagtggagaaaggtttaagatctgtaatcatatttggagttcctttagcaccaggctgtaaagatcctgttggtactgctgcagatgatccaaatggacctgttattcaagggattaaaacattaagacaggcttttccagatctatatattatatgtgacgtgtgtctttgtgaatatacctctcatggacactgtggtgtcctatacaaagatggtacaattaatcgagaactaagtgttgcccgtattgctgctgttgcagttaattatgctaaagcaggtgcacattgtgtcgctccaagtgatatgattgatggtagaattaaagaaattaagcgtggattgattaacgcaggtttagcacataagacctttgttctttcatatgctgcaaaatttagtgccaatctatatggtcctttccgtgatgctgcatgctctgcaccatcttcaggtgatagaaaaagatatcaattacctcatgcaggaagaggtttggctagaagagcagttcagcgtgatatgaatgagggtgccgatggtattattgtcaaaccatctaccttttatttggatattatgcgtgatgcaagtgaaatttgtagagatttgccaatatgtgcttatcatgtatctggggaatatgcaatgttacatgcagccgctgaaaaaggtgttgtggatttaaaaagcattgttttggaatctcaccaagggttcttaagagctggtgctagattaattatcacttattttacgccagagttattagattggatttcagagtaaacataaagacttttgtttgttttttccccattcttaattttaaacgtcatgattttttactattttactatcatcatatcttctcctttttttagataatgaattttgtcgataattttacaataaatggtactgctattatacttagtatactttatgtagttaataccacaatatctattaaatttttgttaattattataaacatttaagagagttgatttattcattcttattatattccttaataaaagtaagtaccttattctataaaaagtatcgttaatattatgcagaaggatccagttattgggttgtatatataaaaactaataattcaaaattctgtacattgtgaatataaagcaagttataaattgataaaaaaaattatttaggctgttatattcctacacatacatccatatacttatccagcaaataacaaactttggaaaattgaaatttaaagtaaaatttcccttaaatattgctactacaataggcccgagtaaaaatgtaaggtaataaattaacaaaaatataatgactatatgattagatagaaaaatatttaatatttattaattagtatctcataatataatttatttaatatactattcttttttttttttttttggaacatcacttgtacttataatcataatcttttaatattttaaattatctcctagcgaaataaatatctgtaaataattaatctaaaattatttataaaattgtgctaccaagacagagattacgaaaaattataatggtgataatagtaatattataaggtaatgcaaagatatatgatatacataaatgtgtttttttaacgctgaaccttccatttttttaatacaagaatttatcgtcacaaatgctaattagatatatacattaaattaaaacataatatactttctaacgaaacgttaatattattaatttttcggaaaattaaaataaaacatatttttataataatttttacaagtatttaataaaatatttaatcatgtgatttaattatagttatttattcgtaaaaaaatatattattataattcgtgccatttgataaaaataagttgtttcgtattacaagatcattactatgtattttgtaatattttattaattgtatgcaacaattgtagaaaagtaaaatctgttatataaaaatattcatatgcttctagtccattaaatatttattttgagtattttgaatgtttaacatttgttttttgcttaatagataaaaaggagagtatattatttattttattttttatttaggaaatttattatacagataagagaataaataagaattttttatcactatgtaaagagcctaactggaaatccagtagatacacaattctgagggtaacacctgagtgtctagctggaagattggtgcagctatatgcgcagtggctcgtataaggtattgaatctgattggagaatttccagggagtgagaattatatcagatcttatcaagaggcctttgattattgaaagataggccggggtaatcatcttatttaaatacatcttagtaataatattaagagataactcttaatatcatacaagaacaacaagaagtaataataccacatcagggttattaattagtgatatatagagctcacgtaagagtgtttatacttatactaattgatatgattcatccatttacatacaacaactcttacacactatttataatatttaaaatgttttagacgtattattttgtgtgttgtataatataagaaaacaaactgtttgatattttttatatacatcgataagttattacataataataaaaaataatacttatgttagtaagcgtccacaacctcaattgtttatgctccttaacactgctcttattcaatttactattccagattcccattattattttatggaataatgtgttcaacattcctcaaatgatgtgatttaaacgtggagacgtatttgactctagtcgacgtaaacctgtttaaatagcatacaaaacacattagacataatgataactcgaaatttcgataggaatatagtaatatactacatatgtgtgagtaatcctaataaaagatcgagatttaaaaattttgcaaaacaaatattgattttggttttattttatgttttcttttttaaaagagagaagagattttaatatgaaaataaaaaaggtaggtatggttggattacttgtacagtaacgcactatactaatttattgagaaatgtatatataaataataagctttaactaaagagtgatactttgtagcaataatattttattgatagttttttttttcgtaaaaatatgtatgttctttagtaaagttattatattgtcgagcgtcagaataaagattctctatagccataatagaattgtatactgtagcataattacatttctatatttttgtttactacctttttctatgtatatttacgtacacaatttactatataaaattgttttgctaagaaatgagacctaacacgttttgttttgaaatgttgttcaacaaagaaataacttccctggaaaaaaattatttaaaaatataaaaatgaattaataagaatttatccaaattgcattacttataatttagtaaaatatattgatagctaataataatgtaaaatagagatcataaatattatttagagatatccaataaaatatacttattaaagtaacaactaactcaatataaaaattatagagtgacttcccgtttcaaatccactacaattaatgtcttgaacaaaaatatactaactaaaaatttgtatacaagaagcgaaaatttagtaatattgtgtattttatttgctctgtttttattttattttattattctgttgatatagaattttcttccagttaaataactgaagaatatcttcaaaactaaatacaatacataattatttaattcatatacctagttaaaatttttaatataaacaacaatgtaagtattcatttgcatcaacttttatatttatattctgatttattgaaaattagaaaagcatatttttttgttgatctgaacttaaacttaattttaaaaattacaaatcaacccaattatgtacgtttcttaaataatatatagttcaaattttttacacgaaatatatacttttaaaattacatcatattaatgtatatatgttctaaaaatcattatttcttcaaatgacagaactactcttcaattttttctatttacttctggttatatcttcttttaaaattcgaaaatttttctaaaatacggtgatagtcttctgtcaataggttgaaagaattgttaattgctttaatcttgccatcattatctggaatgtcatttaaagcttcaaaattttttcgatataatcttttcttaacaaaagcattatactctttatcactttgtagataaagaagtatcatttccacacatctctcaaattgtcttttttctaatttaaagcgtgttctttgatcttcaagccatacagatatttgaagattattattctgaagtttattctcgagagaggtaaaaaagttttcttcagataacatcatcaaatcatttatatctctaagatcatcaaaactttcatttggatcttctatggttacttcaacaacagagagatctgttttccatgaatcatatatgtgagaataaaattgggtgccatgacccttaccctgatatgggggaagaatcaaaaattgtgatattttagctctatattgtcttttgtaattttggctatcgaagtttaaatgaccaccataataccaatatttataagttgttgcaaaacctatacattcctttgtttccatattaaatagccaataaatatcccaaagtggttcttcagtgtctatatatgatgcaccttcgatgaaaaatagtgaaagaatctgtattctacgatgaagctttaataagtttgggtcttctgatagcttaaccttatagatggcaaatttgtttgaattgtcgattgcatattctccgatcttatatttctcatcaggcaggctgtaagttttgtgctcatttttacagatatctctccatttattctcatctttcataataaaatcgttctctggtaaattatcacccagtattttgagaacatcatcataattcttaacagaagtactatatttggcattaataaatggcttaaacgttactgagtcaaacaccaaatgaattgttaaatctttaaatccgaatatagtttctttatcaccataaagtggataagtgaaatttggcttaaattgaatggctttatcttctgaattattgacaattgatattttcaatgcatcgttggaggacaatgtccatctctcaagtttgaaatcttgcgcagatgtcatagagtactatgtcgtgaaatatcacttctggtcgttcaacgcagataaattgacttttatgattgtccatatctaatggtatacattcatttctatctatgtatattgtactataaagcatttgtttttttttctttaatttataaagaaaaagaaatttattaaaaaaaaattactaactttcctaattcaataaataaacaatatttacacaaaaaacgctaaactattataagttggagaatgcaatattttttatacatttaaatatagttcattaaagaaaattttagatattgttatacttccaaataaataatgtgaatgaacgaaagagaagtttagagagcacattgaacaacgtgagatcttttttgggacaataggagatgaaaaaatttgggttagcggcatttaatgataatgataagctatataatgacacactgaaacagtttaatagaaaaactgaagaactttcagaacaattgaatatttttcaagataaactgatagaatttgctaataaacataatcaggggttaaagtcaaatcctgcatttagatccaaatttctacatatgtgtcataatattgggattgatcctttgaaattatatactgaccgagataaacatttatttactgtaaatgatttcttatatgagttatgtattagaataattcaaatttgtagaaatactaaagatattaatggtgggttgataacgtttaacgaattattacgtacatattttaaaactatgaatgtaacggagaaagatttaattgatgctattaatatgttgaggactctagatggaggatttactattttaacaataaagggggaaaaaattcttcgaagtgtacctaacgaactaaccacagatcaaacaaagattctagaagtgtgttcaataatgggttatgcatctatatctcttttaagagctaatcttagttggagcaaggtgagatgtaagtctgtattagatgaaatggtgataaatggtttattatgggtggacaatcaatctgaacaaaatgaaacactgttttggaatccatcatggatcgctaaatcattgacgaactgaaccttcaatgcaatatgaactatctcatctgtctcttaatatacaaatattctaccttgaaatataatctataatattaatttgtctaagaacacacacatacatagtcaaagcataaatattatatatttgtttcaacaattgtttgtttttttgtctttcttttcctaaactttgcattaatgacatctactgattgcatgacgtcacggtctttcatttttttatactgtgacagtacttgaccctttccattacctagattgatccttattttgtcatcaatagttgtcttgctagtcggtaaaatattcttgaaaattgtaacaattgaagattttaattgataatttaatgctagggtatcaactgctttcccatattttacagctttataatcattgagattagtttctatccattccatttcaggaaatttacagtcatacaatattaaagggacatcacttgccatatcgtaaattggtttttgtggggtaagttcaatatctaacatttccgaaattaaattgggagtctcaagttcttgaccaataaggaataggacagccatcatacaacgaacttgatgccataagaatgctgaacctaccaagtcaaaacaataaaaatcatcattaacatgtaagatattagacgaatatatggttctattataatttgtgatttgtttagatccatctatcttacaaaaatttctaaaatcatgctctcctataaactttttagcagcttcattcattttatcaatgtttaacccttcctttttgaaaagatatttgtaatgacgagcttgacagctgaacctggcatcaaatccctttggaggtcttaaagatactgcagatattcttatatcatcaggtaataattggttaagaatgtgtgcatattggatttctctttcatcatttagaggatctttctgttcttcgtcacttaagttggacctgacccataacgaaatgacttgattcatggcactaacacctttatcagttctaccgcaacgactaaatttataatcttgcgggaccattgaaggtacaagtttacatttattcatagcttctaatattgtaccctcaacagtgggtaaaactgttggatctttttgaatagctaaaccattataattccagccaaggtaggcaaacttcaaagcgatgaatcgtctattatgctttgaaaagtcaaaattctttttagcttttttatttttcttatctgaaatattactattaatacatgatctctttttattatttctatatttactatcagcagtattggtagtagcagtaggaatacttctgttattcatttggcacacactaagatcctgtttaagttttttattatccctttccaatttgcaaagtcgttcgataagttcatttctacctaaatcatgatatttgaatatatctgaaacacttgttgaggaattgactggcgtagtggatgctacacttcctttaaataacttcgaaaaaaaaacccatctaatttccaaaaaaaaaaataacgatcaaatagaatatgttctcttcacacaattggtatctctttgtagatgaaatgaagactaaataccgttatgtttgaagtgagtttgccgttgtcacattaacatagacatcataaatttcttcttggaatatttttttgtttatagttatttcgcattttttgttactaatttgctcacttgagacgaaaatacgataagtgttttctagttggtggaacattgtcaagaaattattttccgtgttttgattatattatcctgacccttttgaaaaactaaagttgtattcctgctgatatcatatgtagatggtgaattaagttcaagcttatcaacgcaatttgtattgaacagtaagtaaatgctaacagaatttttggagtagataaatttcgacgtgaaagtgtatctaaaatgttacctaagctaaggatcatggttaactggtaaactcaaaggtatttattgttgaaaattattgtctacatgtattggataaactggatgtgttttcgattttgttttataattcttctgtagttaatactatacaaaattgaagtaaaattatggaaataataatctacaaaatagtgtaaataaaataaaaatacgatataaggcaactgttacctttatatacacggatataaaatagttttcttttacaaacaacaaaaaaattagtcaaatagtcacatcaatgtttactaatatccaaataataaatattcagtactctactgtttgatatctactagaaaaaactgttgttcagtttgttgtattttggaacaccttattttactatttattatagaggaaattccgtaattttttatatatgatatataaaaataagtttatttgaatatataatatagttagataaaatatttagagataatggtagattttgttatgtaaatcttctatcatatatagacagtactatacaaacactgtcatagtattctacgaacagtcaaataaaaagtcaattgacatctataaatgtgggaatattttgtaaactatcaaacatatgtaggctcggcgaattttaatgttgtaatacttttttagaattaaaaatttttttttaatctatcactctgtatatattttacgtcgtatgatatacaatgtttatattatttaatgtatatgagttaatgtttaaaaaataaacagtccatattgctctattgaaaaataaaggttattatttcatatttaataaatcgtaaaatgttatgtattattttttgtaaatttattttatataaaagaagtagcaattttcatagtaattttaaataataatacattttgatgacttcaaatgccctcttggaatttattttttaatcatgttaaattacattaataaatattgttggaacttagcattcataggtatttaatatgtaatgtatattttcaattatagttactaaaatccaatattctagaataaatagaaagaccaattagattttagtaaatataaactgatatctaaatacggaaaatgtattgtttgcttatcagtgaatgcaaacaacacatattgataaattaatgccgttcgtagaaaatatgtgtcagatatgaaaatatataaagccaacaatttttcatatcatattttttcctttgtatactttttatatattattatttctgtattatttatacagaagaacattaaagaactttaatataattttgtacactataactaaataattacaatattaagaatgtttactatttgcctaattaccacaggccctaattcttaataaaataacaacaagaacaaaaaatattataattgtttcatatgtaatgctattaagacaatttaagtgattgacttaccttttgtagcaattacggtttttgactcacacatccataaaatattaaactatactacccaattagcttattaatagaatcatttattccggaagaaatatgttgtattataagaaactatcacgtgctaatataccacagtcactactgtcctaaatattctatgaagtttttgtctacttattacagttaatgattagcttgtaaattactaattcactaatatatcaggttgaaaagttgattgagttccagaaaacatataaaaagacaatgtcttctgaagataacccatttttcatcactcctctcttatacataatttatatattatatataaataaaacgacaaggataaaaaaatatataaactcaatatagctgttcaatagataaagaccgtattggtaatggtactattaactacattaattactatctcaattaaatttattcatttgatatttctcacactcgctaaacaattatgaaactttagattacttcataatggtgccaactattgtataataaagaggcaacgccaccaagattatgtaagattctatctgaatctaaagtgatttattgtgttttaagtacaacatgtccatttgccacctagtatacagtgtgttcacacatctctgttactgcgccaccataacctattgtcctaaatgttctatgttcttcgattatattattgtaactaataataaaaatatggattactaattcattaatatatcaagttgaatagttgatcgagttccagaaaacatataaaaggacaacgttttctgtagatggaactatcttctgtcactcctctcttatacataatttatatatattatatatagaacgaacatcagacgcagaatacaataagcaaatagcataattatataagctcgatatagctgttatgttgaaataaaatgttctataatgaaatagatagaccaataagattttagcagacactaaacgataaattgttgagtaataattgttgagaggtcaccaagggttgttgagtttgtttattaaatatcttactgttcgtagaggaaaatggcttaatgttaacatatataaagccaaggatttcatcatacattatttttatcttatttataatctttgtgtattattacttctatgttgtatatagagaaagaaagtgaagaactttattataattttgtgtactaaatctgtttaatataatattgagaatgtttactatatatccaatgaataaaggcgctcattctcaacatgttaatatataagaccgtattaataattgcattaccgattgtatctgttggaaaatgagagtttgttactgtcatttccatacaaattattttaattagtttttctgtatattatgtggtgtacggatgtaccataatatatgggaaaccattttatttttcaccaaatatgtttttcacagatttgaagagaaatgaaaatcttaaaagaagaatcaaagtaaataaaagaatttatactgtatacactatataataagtacgtacatgtatttagtacaaaacaaaacatgcatctataacttaatgatgtctactattactatggacgctaaggactccaaactccaaccacatcatattgcagcaccaatgttatagtttggacttaggactaattctttaacaggactattgaacgaatagtaagggcaataacaaatatataagaacgttacatataggaaaattaaggattattgcttgtttttctatttatgtttatatacaatatatagattatttacaaaaaacggttatggaagatgatcttttatctccagaaaacgttgtccttttatatgttttctggagctcgagcaattattcagattagtacattaatgatctgactgattcaaaccctaaaatttattatattaatctaggtgtactagtggattagaactgcacctcaattctctaatcatggtaattattatcctattctaaaacaccaactgttgtagtatggtgtggtgaagttctttgtgtattccagggaagcgcaaataatattaatagtaattcaaataatcgagacagtaatcaactatagtcgatagtataattactaaaacggtcttatatattaagcggcttatatcgagctaatgtacttattcgaagttacttgacttgttacttgcttgttctattttgtttatacataatatataaattatttacaagaaacgattatggaagatgatcttttatctcctgaaaacgttgtccttttatatgttttctggagctcgatcgattattcagattactacattaatgacttgactgattcaaaccctaaaatttattatattaatttaggtgcactactggattagaactgcatcccaattctctaatcatggtgattagtaatacacgtgggacttaataaaacaataggtaaattctagatttgccaagatcttatgtaatccaatctttttattatgcagcatctaatgttgtagcacatgtatggcttattaatacactaattggttctagattcattcaggatcttatgtaatcttgatggttataactattctattccacaacaccaacgacaacaagctgcggatttagctcagttgggagagcgccagactgaagatttgaaactttagttaccgttatctggaggtcctgtgttcgatccacagaattcgcattgtttttttgaaaaatttgtagtaatgtaaaaatgtaatagatgaaaacccaattacgagagatatactcttctagacgctaaaatagataaatattgcttgatttattgtctatatatgacatataaactacactttacataaagaataaactaatatacacagatatacagacaaacatagttatataaataaggtaaacacgaaaaacaagagtgtagtcgttgaccaaggagtccacaagatcatttatagtgacctctggatttcatatgtcacaataatagtatctttgggaaagctactggatggaaagaccaaccaatgtcctaaacagaataatggaaggtagaatgattgattgtataataactgtttattttagttattatattttgtatatttttagactactgatataaaatattttaaaataaaatagattgaacgataattttttttagtagataccaaacggtagaatattgaaatatttattatttggatattagtaaacattgatgtgactatttggctactttttgttgtttgtaaaagaaagctattttatatccgtgtatataaaggtaacagttgccttatatcgtatttttattttatttacactattttgtagattattatttccataattttacttcaattttgtatagtattaactacagaagaattataaaacaaaatcgaaaacacatccagtttatccaatacatgtagacaataattttcaactgttgttgcataaggaatcctaatacaatgtatttttgatagttttatgtaaacacacgtagagaattgttaatactaaacaataaataagaataaacaagaagaatttcaagaagaaagcgtaaaagtggtatataagagaaaaaaagatagatatatatttatgtaatatttaaagcatacagttaggaaaaatttatgacacatgatgtaaaaataatttttggaaaaagtaaagctagactcaaaacaaaaattttattctaacattatatcagttcagctgttacgttgagctttttcagagaatactaaaatatatgtacaaaaatatttaaccacaatctccgaatattaaaaatacatatatttttataagtcatactaggtaaatgtccatattttagaattatggtgtcttgacattctactattgtaaaaaaatagttagactcagatctaatctatcatttctccctacataaagacaagaaaggttaataccaaaacttacaacagaatattttcttaattgcttgtacattattaatactactagcgttgtctacatgtgtcgcatatgtatagtttcctaacacatttttatggccattatgtcacattttctttcttaagaaaacttaaagatattctatccttgaggagccctacaaaattattttaataaaaaaccagactcttttaaatcatatcttcaacccagataggataaaaaatgctggaaatctaataactggtctatattttaaaaattataaaaacctatataaaaaagtcatgagaacatataaaaatatatatgtatattatcatttttttatttattctttcatctttcattgttcgccaaacacaaaaggcatttataatcatcatctttttgtcctaaattgttcaaacactttttatggaatccatgacaacacttaaaaacaaccattatatcatttaaagatcgattctctattgatttttgcattttctgcctgaattcccattgaagaaatatatcaggatctaatccaacaccccataatgccttaccacatatttcgcactccgaattatgtatcgcccatccttcttttaatttcttctgataattattgaccattccaaagaatgattcttgaataatttttaataatgtctttgaaatagcttcttcaagcctatatgatgtaaaaatctgaacaaataatttttctacatcatttgtttttgtcattatgataccacagtcattaagtatacctgtcataatctcatataaattgttgtcgatttttccttcaatagctatcatctgaaaaaataatttatttaatgttttattacattctggatttctactaattttttccctgtttcgactgaattctttcataatagtagatactaatgtgatccaatattttactctgtcacctttcattgacaaaatggattcaataccagaagaaacataattattcaaggaatcaatattcacatcacccctttcttgaaaaagcttgttgacacatttaacaatacacaaaaattcttcagaaaatttccccatgtgacggtagattgcgcaaatggcatcatagttgttgactttctgaagttcttctagtaattcattgtcacccaacagtattaatcccttatctcttacccagttagtcagacattgacctttcctaagttgacatgacaaattaatataataccttttcaattctgtattttggtatttcatatccctaacatttataaaataatattcaagataatccaatttcaatgtatccggaactgatatgtacttaatcaacaaatgcagtgttggatcaattttttgtataatattaacaatattttctgttgttgtcatctcaagtattgacttgaaattctctttgatcaatgctttcatactaataaaatcagcagtcttcttttccgtatcacaacatgcatcctcaataacaagagatagatcaatatcttctgagaaatttttattttctttatctaacaccatttttatgatttcaaggtatttatgacttctcttataaaaaaaatatagtactttttgaaaatttctagctttccactgtgttatcaaatgatatgaatcagttggtatgtatatttttatcatgtctattattaaatattcaattgattcttggtccaaacctaatgtatcaggaaaactagaaactatattcataattgcatctaattctgtgttattaatatgtaaattttggaaatattgatttaaataataaataataaatgacactgtataatactttgaatattcatttaatgatattttctcttcttctaatacattaagcaaaatatctaatacactttgctttgtaatcttcaaaatgaattggccagaaaaattattattatccacataattatctaactttttctcattgtttaacccactaaaaaatgggtcttttaatatttttgttagcatttcatagaaccttttagaatcatatctcatcaaaagcttgaaatatggaaatgatggttcatcgtcatttccaatgctattatacctgattgttttcaatttttcctcactgttaaaaggccatgcaatatctaccccattaaaaagaacataagtcatatgttgttgattctgatagatctgtatcttatcttctacaacaaatgaggttggatattgtaatcccttgtaacaactttcaatatagtcaaatattatacaaggattaaggttctcctcagaattcatctctacatcacccaaaacagtactgtgtaccaaattcccatccctaatccatttcaaaagctcaataaatggggacatataatcattaaaagatacattccaaatatacaacaacatatctaaattatgttgttcttgacagagacgaatcaaaagatcacaatcccagcttgatttgtctaacataaacagaaatgtttgtatcgatgttggatatttctgtaaaatagcctgaaacagagttggtgatagacttctaatgacgttgccattaattagttcatgtattgtaattagaaatacctcttgaaagtgatctattatatcttgtggttgttgaagtattgtttcccatgttatatctaaaaactgagatgttactttctgactttctctagggaaccattttatttgtaactgaatagccatagatataagactcttaatagaatctactttattattattcaggagaaattttaatgcagcaaatactaaattattaaaaggatcctttaattgagtttttctaacttcatagttagtagataagttcaagaaagttggaataggaaatttttcactaacaaattgatttaataaagataacgaacctatgtagtcaccactctgtacctttttcaaaagtagactggaccaagaaacaaatttacctatcttgaatgaataattagtgagtagaaataatttatttctgtaccatttaaaatgtttatttggtggaattagtaaatcatgtgtcaggagatctatattcattacaatattgaaattttcaaatggattaataattaacagttggtgagacacagttaaaacacctaataaattttgtgccatccattgaattgaaagaataagttctttgcagtcccaaacaaatttatgagtcttgtttaatttttcaatctcagaatatactgttactcgatttttaatagagtatgcaagattattgtcggtccaagacaaagaattttgaagaacaatatcgcgtgaaataggagctaattcaactgtatctttaaaacccatttttccaaaaccatggtttttctgtgtagatataatcccaaaatttctattggtcaaaattgctaatttatcacctttcaaatatgtatttaaaataatttcatttggtgccacatgtaaaattctttgaacactatatgtcatattccaaaacccagttctatgtccattatgatagagaacattcccatgggtatcactaacgattaaaccagtatgtctatttggcatgaaatcgatccctgtgatttcttttccttgatgttccgtaatatgtaatatggcaggaataggtttaataattctttgaaatccatctacaatatcattattagaaaaagttgattcagaatgtagttcactgctatatatatctgcagaataatttaaattccaaaggtatacatctccagactcgtaacttgcagctaaatgtgtaccatcatatgacatgacaatatcaaccacttttgaatgcaacgaagtgacaaacctattcattaaagaattttgttgttgtaaagatggtgaaatttcttttttagtttgaggtaataatatgacctgcaaaaattctttataattgaaaattaatagggcacctttaattgtacccaacacaaaatatgaatttgtaggtaatatacaggagggtccaccatatgcgcttattatggaatagattctgttgaaagatgtccaattaatcaatttttgtggatctaaaactaaattacttgtcatattaaaaatattaacatttgatgggataacacgattttcaacataatgatcatctgattcagtagcctggcttttgttgttaaacaataaagaacttaaactcatggaaacctgttttccactcttttttgctatttaaaaacaatttaatgatttgttatgtgaaaacacctttgattctagcattaaacgaataacaccctataaagtatactatttcagcttaaattattatagctgttaatttagtaagatgagataaggtaacacccgtaataacaactaaacagtaaatagaagtttcttttccttcttgtaaagttcaatacttaacaattaaggctgcaaacatatttatcgcggtgatcttgtttgatttaagtttggtatgccataaaatgacactttctttcaatttttctatttttataaacacaagggctgagaaaatcttcatagataaaaacatataatcaacagggagataaaaggtacagtaagaaagtaaatacaagtaagatagttggaactatggttacaaagtacaaatacattcaatgataaacggaagaatatggtattatggattataatctttatttttcataaatattttgcatatatatgcctatccaatctagtattcgctatatctgaactttgcaaccacaggttttaatccttataagatatggtggtaatgctattcctactgtattagctgatactagtaactttaatacttagtttcagagtattatcatatttattcttattataaaaacaagatagaaaaaaaatatttataaagtcatgattttattggattaagaacaagaattaataaatctgttagtgtaattttgtgtattaaaggtgtactagacctgagaatctatttgatagttattcattctgttaatgaccaaattaaaaaaaacaataattaagtttttatataacaataatcaatcactctacacaagaagtatattgaagtatatcaagaacagatcttaggatatgagagtcagaaattttaccaaatccaactgttaatccaaaattgtgtaaaagaaggagattgaaaaacaaatcgaataggttcacaagtgtacttcttacgtgccagaaaatttctcaacaaaatgattttgataacagtatgaataagaacaaactagctgccttattaatagtgatttttctttcggactaaatgtaatattatatgaatttttattgaataatataattcagtgtgtttataaagagtagtcaatttggttgaagatggtctataacgctccactagacttatgataactacttaataaaaggttaaatctaagaaaaagctgcaaagtcttggatgctacttctggagagaaggctattctattcataattgaaaaaaaatcgacaaaatctcaatcttgatgcctcaatatttaatagaaagaataaacacatattgtcaactaataataattacttgtttggattatgtgctattgcaaatgaacagtttggcaaatataaagtcagttttgatagtagtgattcaaatagtatttgtagcaatattattacataaaataacttatgtttcaaatataccttttaattcagtaccaatttcaccttcaaattggtttaatagtgccaattttattttcacgaagtataaattgcggatagaaagacctaagacaaaactcctacttattatagccattaaaaaagataatctatatatttatacttcaaatatacacgataatgtagcttcatatgttattcaaaagctaaattctttactctattttctttttaataatattatggtaatgttaaaggtctgtatctcgttttcacagagaatcacgactcccctattttacatctaatgataaaatggtttaatgtattaatacttttcaacaagtagcacttttaaatttgtattgattagttttcttcaatacgtcagtctcttattttttcttaccccaaatcttaatatgtatcattgcttatctatttaaggtaattcacaaacaggtaaaaacagttgaacgatcaaggactgccaaacttgttaggtaacaatgactccacaaattctataaaaatactagaaagaaattaatagaagaatccgatattgtaaaaatttcaaaaaataatattctaattttgatagttcttctagttctatacctttaacaaagattttctataccatccctatttagttacaatttttaacaagatctttaccagattcgtatacaaactattatttacatttttattggttattaagtaagatgtatgttggaaaataaaatattaatgtaatatactaatttttattactcatacacacacatacatatatagtacgtaaggaaaataaccaagcaaatttatgcaaagctataccctaatatacgattccttgcgtttacaaaaggtggtcaatctaaaatacagcactgtagtgctcaatctaatgttgaatattcttatatctttcaataacatgaacaatgatgatgcttgtgtaaaataaaatcagtctattcaaaagatccaaggttgtatgagtcctcttcttttcttctttttctccttcttgcttttattttattttagttaatgtgtataagatcgcttactgggatcttgaagaaagtacagggtttttatataatatataagcatctatataatagaaaaccaataagttagtttataagttttgtttaattttgcaacaaagaatatatgttttctgtatcattaatactatttccatcagttataccacctaacaatagatcttgttgcaaaatagtcattggtgaaggtgtattggactgactagactgcgatccgttggataatttagatataaggtacgttgatgtgttgtcaatatagttatcagtattagtagtagcggtggtagtagtagtagtagctgtcattgttgctgcttttgttttagcaacattagtgaaatgatcaaactcaaaaatcgacatatctaaagggatctgcttatgtatctcatcgaatggttccaacaatttgtctattggattagatttatcactcgacgtggaatttttatttggtatgaatgtagaaaaaaacggatcggataatgtagtattaaagttatcatttttcttatcgtctattattcggatatcattattaatattatcagtggattttgtggtttcaaactgagaaaaagctatttgttcgtcttcactgtcactactaaaatccttaacatccataataattttatcattaccgtactttgatagaatattatctttatttgccttatgtgcaacaatagccatagcttccaaagcttccttatttgataagatatttggatccaccagactttgtgcagtagtaataaacctagaatgcccatttgaagttttgatcattttcaatttcccattcttggatctttcatgtctcaccactctcaaataattttgtggtaaacctttacattgaccagtctcaatgtgtgattcaacccaattcttagcggatgcacaatattcaccacattgtgcacaatgcccgtgagatctatttctttcatttggcttaacaccatttggatataacagatgccttgtcttcaaatgagtcttatatgtgtccctacgactaaaaccgcctgaattatgacatcttaattcctttggtgaatcctctttatagaagggacatctataagccttttcaatagcatgcttcttaatatgacgagttaagtagccacgaatcctaaattttgcatcacaatagtggcagataaatggaccgccattgctagtgctattaatactactactatcagtggtgctatcattattgttgttgtgtttcttgtctttgtttaaatctaactggaactcgtatgttccattataatatctcgaggtagtatgcaaaacagaccctttttggtaggttggtgttgtacttaaattcgacaatcgccaattatctttattataataatatggttcatcatcttctccctgatcattctcatattctaatttgaacattgtttacaaatgaaaaatgtttgtcccctttagttcctcgagaagtgttatctagctagaggtccaatgcaaacatataaccatttgtagtgaagagaaatatagtctgtcacacacaatatacagaaactaacctttataatgatcaaaatctttcaagagaaaaagaaaaaaaaaaaaaaaaaaaaagagacagaacagaaaaaaatttgttttcttaacatttttattgtccaaataacaagtgtctgggttttggactctgtttcttgactgcgtttttatcataaaatataacattttaaactttcgtaggagatgatttcttgtaaattcgttgaatatgattattttcgggtgtatggatgtacagaattgaattgcttttttttttattttattttattttttctatttgatgctcattgaaattgattaaatattagatgtaagaggtggtattattattattattattactattactactactactactaccaacaccactattgttactataatagctgatagtagtattagtgtaagtagtagttgcttattaattttggagtgattaaaggttagttgattattcttattactttccaaaatttattagagaaactaatcagatgtctgtgaaggtgccctttttttggtaggcagaatatacatttatatatttacacacatacacatacacattcacatacacatatagtataggcacagataatattggatggaataatgagtgagaatcaggacaatgaagaattaaattttaatgaacttataggaaatcttttaacttcccataatgaggcacacgaacaacatgacatggatgcagctgcagccattggtgattcggacaatatgacaaaagagagtgagcagaatcctaatgaatcaaatatggatattgacataaaccatgatgttcatgatatggatttgcccgatataatggatgatgacatagatgaaggaggttttggaccaaatgcatctgattttacctctgttgtaaataatgcaatagatcttataaaaccaactaccaattccaatacaaatgaacaggaccatgagacaggaaatgtcatcaccgagcctcatattgacgaagaacaacagaatgaatgggcccatcttctgcaacgaggtttatacgaagaagaaccaggtcaagagcagggtgatgctcacgctgaaaattataataaaattgaacagaatgtaggagatacacaatttgatgatgatgcattggatcaagatgatgaaaatttaagaagggccatcttagaaacacttcaggtaataagcaataatacaatagacgaggatgtacctaataataatatagagaataatagagacaataataatacatttgagggtataaaacaagtggaaattctggataaaccaactaaaaaaacctcgaaaaagaaaaagaaagataaggataaacaaaaacaaacatctcacaatagtagtagtagtaaaaaaaccgttgcagaatctagtgaacaagaagaaaagaaaaaaccaaagagtaaaaagaaaagtaaagaaaaggagaaatcaagactcacaaagaatgaaagtaagaaaaatatccagaataatgaagttgtcaataatgaccatttaatacagattgatgatgttatcagaggtattatggaaagtgatactttattagaaagtaataatgacctcaatattcttaataacaccactaatgattttaatgaaattaataaacaagaggttaataatgataccaatgattttgaaacacaagccttagtagaagccacattaaaagcttttgagaaggagttaatggcatccgaaaccagttcagtgtctaccacaaagactaagaaagcatctaccacgtcaaaaaaaacatcatctaagagcaaatcaaaatcgactaccaaaaagcctaccaagtctaaagtttcgactacttcaaaaactgctactactacagaaacaaacaaagatttagattatgaaatacccatatcgtctttttacccccaaccaaagaagaccaccactactacgacaaaaaagaaaaagaaaaagaagacagataaatctgtgactgcaagtaaagagcttcaaaatgtgctaacagagagtagcgatttccaagatgacgaattttcaaaagtcttggctgaaattgttaaccaagttgttgaaacatctttagcagaacctattgaagaaaaagaaaaagcaaagacaaaagcaaaaacaaagagaaagggagaagaacgagagaaaaaatcatccaaacattctgtagattcttcctctaaatctatacgaaaggatacttcggaaaataggacttcaaaagataaaaaaaagataactcaaacaaaaatagaccacctatctcctattactaaggctatacaacctgtacatgataataaagaagaagaaaaagataatgatgatgacgaaccatttgatttgaatcaaattatgcaaaatgcaatgtcgcttgcctttcaaactaaacatagagaaagtgaggagaaggaagaagaaccaaggttagaggaaagattacaagagatacaaatagaatctcccaagtctatagagttacaagattcagaaaaactaatagaagtgaaagataaaaaggaacatgaaacatccaagaaatctgaggaagaggaaccaagctcgaataatgaactaagcattagtgaaagaaagcaaaaaaagacaaaaccaaaaaaaatagctaagacaaagaaatctgaaaaggcgactaagttagaaacaattaaagtaaaaaaaccaaaagagcctaagggaaaacctaaaagttcaaaaaagaaaacctctgaaccaacagaacgtaaaaaatttgaaacgattataattgataatttccaaaagaaacttgctaataattctatgagtgatataaccaattctatgagaaaattaaatgcacaggccaaaggaagggttgacaataaaaacagagaaattatcatacgtaatgtcgagattgaaaaaagatttgctaaattgaaaaatggtttggtaatgaagtcacaatcacccgaagaagtatttaggaagaaatttagtcttattgcagccgcagctgcaaatgaagctagaaaacgtcgtcgacagaagaataaagaacttcgcttaaaattgaaggaagaaaaagaaaaaataaggattgcaaagaaagcccaaaaggaactagatcaagcaaaattcgatgcagaacaaaaagagttagcagaaatagtagctaggggacctccatatccacctgatttaaggttaacaaagaagggtgttccaaagaagccatatagaagatggactccagaagaaatgaaactaagagctcaattagataatgaatctcttgatgaagttgagcctaaaataaaggttcttaaatctagtaagaatggtgttgcagcaataaccaaggcaccattgttcaattttattagactgaatgttgttttggataaaaaaaatttacaagatattaaggaaactttattaaaaatccatcttccagagtcttatcttgactacttgttttcggatagtggtactcttggttatcccattaatgaaattgtcatggcattagagaatagaataatatataaatttgactcatcagctaaaactattgtacataaggaacggtttttgtttcatccaccgtggatgttaccactgtgtccaccaattgcattacctgtagcaagaagaagcatcgccagtaaaaagcataacaagaaaaagacatctggcatacaagatacttctgcatttattgctgttactaaaaaattgattccaactattttaaatccgattataaacactttgaaaactgctgctaaaaaaagaatagccaatggtgcatcaccagaagaagctaccagacatcttttaactattattaatcataccaaaaaatctattgctcaagtaataacaaatgctagaaaccgtcaattacgacaatcattgacaaaagtaaagctcgaagatgctgttaataaaactgcactttctaccataaaatcaaacaatcttaatatgataccattactaaatacggttaatcgtaacaaaagacctttagattctacagatgtacaaaatccagatacaaacaagaagaatgtattgaatgtaataccattagttcctttgacaaaaaaaattaaaagagatgaaaagtcgacccctgaagttatagtaatacccgatcataaaagtaatacagataataataattttagcgaggcaactatttttgctaaacctataaaaaatattaagacaataggagagactactagtgatttaaataaggtagatgatatggtagagaagaatacaataatagatttgaatgtcactaaaccaatccaaacaaatatcgataaaatttctttagaatcttctgtcactgatcttggaacagtaactactttggataaagtatctaatgaaattactaagaatatcaatgattgtaaaactccactacttcctaaatcatctattttggagaattcagacagcagttataatacaacagatgcagaaactaatactgatgaaaaaatatctgataaaaatgacaataaacataatggatcaattattagcaagaaggtggacaacaacactctaaaagaacgatcaatgcaatctattactttagataaaattaatgatttaacagctgaacagcattgtagtgcagaagtgttaccaaatgataagaataattctttgcttgttaaaaaagaaactaaaaatggggaacttaatgtgataatggacaaaaattctttattggacacaaacgatctgaatgataaaaagtcaactgctaataatatagataagtcagatacaaataacgttaatacaaccttaataaactatagctctgaaacttcagttcatcctattacaaaaaatgttaactctgagactaatgaggataccattgaaaagtctactattaagaaggattcaaaatataatgatgaaacttctgataatatacatattgaaactgaaaaagatacaggatctcaacaagaaatgacaaaattaatttcatcacaagataatgacgagaaagaaggaatagaacatattgaaaaaattgttccaaaaaaggtttttgatatagaaacaaatggaatagatgaaattcataaaaataaagaagaagaaaaggatattattaaaatcaaacaagaaaacgaatcaggtttgaaaaaaatcccaattgatattcctagcacatcgaatgaaactatcgcaccaaatgcaccaattaaagttgaatccatggttcagtcattggttgttcaacagcttcagaactctaatgaagaggatggagaggcattacctattggtattacaagtattataacctccactttgaccgatttgcttcctaaaatccaacaagatttcataacagaagaaaagagacaacgaagaacaggtccaaacagtgttttaaaccttgacggattggtaccaccatctcaagtaaaaatgtcacctgctgaaaggttactaaagaatccaattgataggaaaataaaaccacctaaagtcaaagaaagaaaagatacattccaggtgaaatataactttaacatacctgatttttccaacatatctgggaaaaagaatattttacaaaaaaaattgaaagaatttttatctaatgaagaatttgagcttttaaggaaggatataagtaaagagagaaagagaagatggagagacgccaatggcattcaaaacaagataaacgatttacgtgcaaggttaaggaaacgtgccacaaaggcatttggtattgaaaatactaaggagaaattagaatgggttgattcaacattcaagaagaaatgtgaagaagcaggttttaccgaatttttggctcagaaaccaaattattctgaaaaaagggataaggctacaataacagataatgatatattgaatatgcttgctatcaatttgaatagattagatttggctcataaaattgaagcttcattaattgaagaagctaaagtcgaggttgaacctaaacggaaaaaaagaaagattgaaaaaattacccaagagataaagggatctgatgattctagtattataactgagtctagtgaatctgtttcaaataatgttaaattaagtaaggatactgtaataagtgataatagtaaagattcgtcagttgggaataacaaaaatccagaaaatattaatgatgatttaaaagagagtagtaacaacaaccctatccctgatacaaatattgatactcgtttgattgccatttaaggaaggttatatattgtacgcaactatttttaactcaattagtttgtttacttgaaattagacaaatgtatacaaacaattaggccaatatagaaaataaaaatgtatggacaattctatatatatttgaaacagtgataacaataataataattttgaaatatactttaaaatatatagaaaattgtatgcattggaagagggtgaaagagagcatagatattatataaatgatatacatggatgatagtaataattacaattatagtaagatcttttaacattttgccaatttggtaaaatttttgtgatatcaacagtggtgaattcacatttcattccataagtagcaacatctatctcaacaatttttttataaacatcatagcatatttctctatcggcaccaagtccattgaaaaaagagaatatcccctcaggcttgattaaccccacaatgacatcatatagatccaacatatcctgataatgttcactaaaagtgtcatagtatataccatcaaagaagacatcaccttggtccaacagtctatttaaagtgtcttgccatctaccttctaaaatgaccacatttggtttatcataccaaccatcttttctcatctttgccaatacatcaggatgagcctcacatatataatgtaatttgggtgctttagtttgaatgtatgtgtctattatccccataccaaacccaatatttaagacaatggcatcgttgttagcctctaaagcaggagatgagaacaaagtgtcagcagctaatttcatgatttgatcctcccattccatcatgacaccatctctgttattctttgtaacaagggaatcttttgtatattccaattcggtgtttaaataagtcatttgatcaccggcagtagcgtcattatcagtattttcattggagttgtcactagtattatcattagcaatttcttctgcgtgatcaactaggcagtgtccttcttccttttcaatatcataatcatctaaaaactgtatattattatcgtcaatcttacgtagaagcaattctgcaccgacacctgcctccacaagacgttgatataaggggccatccttagactgaccgttcaataataaaaggtcgcctacagttttattttcatagtctaagaaattccaacctgcaccatattcaaacagcacgttcattaatttcaacacgatgtcggtttcttctgatgttaaatctttaggcaacgatctagctaagatatgcaatggagtggtattggaattattatcgtcatcattttctatttcttcattcttttccttttcatcagattcttccttctcattggtattgttgttcgagttgctcttttcaaaggctattatttgttctaatgtgtaagtggcagggatgcctgcctttagaaattcagttaatggaacaacataacttttttcattgattggtcttttaggaaatgttaataaatgatgtaattcagacatgtgtagacgggggtgcaggagtggaatagagaaaacgatatgcaatgagatgagatgggttaaaaaaataaataaataagtcagtaaatgaacaaataaattggtttatttttcaacgggatagattcaatacgactgttgactggtagacgtgtacattcatgacagtgaaagaaatggcgtgatctcatgttaaacaagttgtaattgagagcacttaacataaattataacacattcgttatagcaatataagtatattctatatttcccaataacaaaaatttttcacttgccaacagattttgcgatggcggaatctttgcggaaaaaacccataagtcacatctagaaacctaaacatttattttgttattgcgctaccatatacaattaatctggtccacgaaagaaaattggtgtacggatttgtttttttctctattagttttgtttttaaaaattttcttttcctgcgtttgcagatcgaaaaattgcagaggtaagaaaaaaaaaggacagaggggcaagaagttctaatttgttgatgggatcaccatttatatcatgtggtatttgtgctactattgtaagttgattcttgtagtctcttctgccaactttaattttgcatttttccatttttttatatatcccataccgtttaaccgtatactataccattactgtaagataagataagataataaataataatattaatataaatacaaacacaaatacaaatacaaatataaatattgattatagattagactcacatagatggaaggtattcttgatttctctaaagatttagatatcaatttattagatcaggttgtgagcactttttacactagttcaggtgctcaacaaaaggaagctcaaactattttgaccaaatttcaggagcatccggatgcttggcagcgtgcggatcaaatcctacaattttctaaaaatcctcagaccaaatttatcggtctatctatccttgataaattaatcactacgaaatggaaactattaccaaatgaacaaagaataggtatcagaaactttgttgtcggtatgattatttcaatgtgccaagataatgcacttttcgaaaattctaagaatttaattaataaatcggatttaactttggttcagatccttaagcaggaatggccacagaattggcctgagtttattcctgaattgatcgggtcttccacctcatccttaaacgtatgcgaaaataacatggttattttaaaattgttgtctgaagaggtctttgatttttctgctgaacaaatgactcaagcaaaagctttacatttgaaaaaatccatgtctaaagaatttgaacagatttttaaactatgttaccaagttttggaacaagcaaattcatcctctaccttaattgtggccactttggagtcgttacttagatatctacattggatcccataccgttacatttatgagactaatatattacaactattaagtaccaagttcctttcttcttcaaatacaagatccgtgactttgaagtgtttaacagaagtgtctaacttagaattaccactcaacaatccttcaattgtcactcaaactgttctatatttccaaaacgctttacaacagatctctactaatgtcatccctatagatgcagacttgaaagctacttacaattcggctaatggtaatgatcaatccttcttacaagattttgcaatgtttttgactacatatctgactaaccatagatccttattggaaagtgatgaaaatttaagagatttgctgatcaatgcccaccaatacttaattcaattgtcaaagattgatgaaagagaactgttcaaaaccactttggattattggaataacctcgtttcctccttatttcaagaggttcaaaagattcctgtcaatgaaatgaatccattgatgcaattaactgtaggtaaccaatccgtatcaactgggtcgggtgctttgaacccagagtacatgaaacgattcccattaaagaaacatatatatgagaatatttgttctcaattaagatgggttattattgaaaatatggttagaccagaagaagtccttgttgtggagaacgatgaaggtgagattgttagagagtttgttaaggaatcagatacaatccaattatataaatctgaaagagaggtgctagtctatttgacccatttgaatgttgttgatactgaacaaatcatgattaacaaattagctaggcagatcgatggttctgaatggtcctggcataacattaataccctgtcatgggccattgggtctatctcaggtactatgagtgaggacactgaaaaaagattcgtggttactgtgattaaggatcttttggccttgactgaaaagaaaaggggcaaagataataaagctgtggtggcatcagatattatgtatgttgtgggtcaatatccaagattcctaagagcacattggaattttttgagaactgttgtgttaaaactatttgaatttatgcatgaaacccatgagggtgtccaagatatggcatgtgatacttttataaagattgttcaaaaatgtaagtaccactttgttatccaacaaccacgtgaatccgaaccattcattcaaaccattatcaaagatattcagaagactacaagtgatttacaaccacaacaagtccatactttctatagagcatgtggtataatcatatctgaggagagaaaccaagctgaaaaaattagattgttgggtgatttgatgcaattacccaatatggcatgggatgctattgtagaacaatctaccgccaatccatcgttattgttagattcagagactgttaaaattattgccaacatcataaaaactaatgttgctgtctgtacatcgatgggtgcagatttttattcccaattaggtcatatctattataatatgttacaattgtatcgtgcggtgtcctcaatgatttcaaatcaagtagccacagaaggattaattgctacaaaaactccaaaagtacgtggtctaagaacgattaaaaaagaagtgctaaaattaattgaaatttatattaacaatgctaagaatttagatgatatagttaaagtgttagtggaacctttgttaaatgcagtgttagaagattatatgaacaatgtcccagatgcaagagatgcagaagtgttaaattgtatgactactgtagttagtaaagttggtcatatgattccacagggtgtcatattaatcttacaaagtgtcttcgaatgcacgttaaatatgataaccaacgatttcacagaatatccagaacatagagttgagttttataaattgctaaaggtgattaatgaaaaatcatttagatcatttctggagttaccacctgcagcattcaaattgtttattgattctatctgttgggcctttaaacataataatagagatattgaggtcaatggtctttcaattgcattacaattaattaaaaacattgagatgatgaataacagtggggatgaaacaagtgtgcaatttgccaacaatttctatcaaaactactatttcttatttataagtgaaacgttctatgttttaaccgatagtgatcataaatctgggttctctaaacaatcattattattgatgagattaatttcattgatatacgataataagatccaagtaccagtttataaaaacggtgatgcaccagagggtacatcgaaccaaattttcttgaatcaatatctatcgaatatgttagccaatgcgttcccacatttgacagcagaacagatcactaatttcttaaatgcattgactaaacaatatagggattcgataaagttcagtggtatattaagagatttcttggtacaaattaaagaatatggtggtgatccaacagattatttgtttgcagaggaaagagaaaatgaattaaacgaacagaataggattcaaaaagaacaagcagccaaagttggtgggttattgaaaccatctgaaatagatgattaaaaactattatagttgaaaaatcaggtaaaaagaaaaaaaagtatattgatatatatatatatatataatatatagatatatatataatagtaaaaaaaaaaacttttttttgagactttatattatgtacaagtatcattgtagaggcaacgctatatatatatatatatgtgtgtgtaggggagggagaaagagaatgagtagaaataatggttataaggttggtggtcgtttaaaggaatcctgtattttaacaaaggaaccctttggaccagggatagcacctttaatccacaatacactattaacgtcatcgattttcataacttgtaggttctgcagagtgacattgtgaccacccattctaccgggcattttcttaccaggcaagatcctacctggatcttgatgctgaccgtatgatccaccatgtctatgggtcaaagagttaccgtgtgatgcaggttggcctttaaaattgtgacgtttcataacaccagcaaaacctttacccttggagacagattgacaatccacaaattggtttaatttgaaaaaggagggtttcaaaagagtccccacaggcagtagtccatttgagtcagcgaactggaactcacagactttttcctttggattgacaccgattttagcgaaatgtcccagcatttgtcgcgtctctctcaacgggttatctaagttaccatacccgacttgtaaagcccaatacccattaacctcgggggttctatgcaaaaggacttccacgttattcaattctacaacggtgcatgctatcctgtggcctgtctcaaggtcgaagaagggagacatgcctaattttttaccaatgacacctgtcctgtggggcaaccatttgttggataatctttgggacacattgttctgtttggacgctatggaattagaggttgattttagcaaatcagggcttattgagggcgatatggtggatggtgcgaccagttttggtcttgtgatatacgttctaaataattgtttcaacattgataaatgttggtgggaaagagagggttctttgcgtgaggtttggaatgatagttagattcaacaatggggaaagagacacgtcaaaaatatgtacatgtatgtgtatatatgtttttacctatcttatagaaacataaaacaaaacaaaacaaaacaaaacaaaacaaaacaaaataaaataaaataaaataaaataagtaaataaataaagaagaaaagaaaaataatacgatttcagtagactttctactttctttctttcgctttcaactttcactttgtctctaatcctctaatcttcaactctacagctttatcttttttttatttattttattttcttagccctgggtttttttcatttgaaaagggggaagaggagaaaattagtgatagagcgggagaaaagagggaaatacgacgggatttaggcggaaaggagtctagaaaagccgtcttgaaacgcaaaatccgctccagcggctttggcggaagcaacgggggataaatttttttttgtttttttttttgctcttctctgctatctccgcttttctccggccatatattccaacacagaaaaaaagggctacaggaaagttttgcctcaacaagaaaattgaaaagagttcctttccctttgtacaaaaagaacccaacagtgctctatagacgcctggcagaaggtagggcagacaaagttaaagatgcgcattaagttataaagcacccatttctctataggattgaatatatatatacatacatatatataacatgttgtctatttcctttaaatataataaagtctagttgtgacctcacaactataccccatcaggcttaaatactttattataaaaaagaaaaaaaagataggaaaatatatacataaaaaaaaatggttttccaaaaaatgataggacgaaaaatggactcctttactctgtacacaaaagcatgtatacagtgttatcgagacaatgaatggatagtcttggtaaaaggcaaagactatattctgaaaaaggtagtgttctttttcttttgctttctgctaaagaacacaatcattgatctcagggtccaccgcccatactggtctctccatctactccccaaaagaaaactggcaagccagtgcaaaaaataagctgtgggaattcctctttttttttgccttccgtatatttttgtaattcttgtgttgtttatatatgtttttccagtgtctttgagtaaggaaattttttaaaaataaaagaaaataaaaagaaaagaaaaaaaagaaaagaaaagagaatgtgtggatcacgtggaagtcatgtgacaagtttaaccagggtttctgttagggttgtagccagaatagagagggtttacctggttttttttttatttttattatttaaatttttattttacttctaatgggagtgtaggaaggggcaatgaccagtactgtgtttacttatccagtatgtttaagttgcggtctggtgattatatctagctgtccaggctagattggtttattcgtattcttgtttttaatttgttttatctttttaagacgtaaaattgctcatttaataagggtattcgttcgtattataaatgtccagaaattttttggtagaaaaattaataacaaatgttgttagggattctaagattgtaggctcttccaagaagaccaattatcgcctaagcaaaaagttactggatttcaatggtcaattattatctttctccagttataatccagattttaaaactgctggggacttaattggtaattcattcgaatatgatattgaaacctcttcaatctcattgaataagcagctttgtttgattccgaagagagatactaaatacctgacttttaaagatacttattatatattattcaaagatagaaattttatgaattcttttatattatctaacaatatccacactaataagagtggcaccaatataatattaacaaatgatgaggtccgtttgaaattgaaacccgagactgcgttgcagtccttcttagattattatattagtttctttaatactttgcacgattattattattgttgttattattattattgtggtaataataattgtgaagacattcgtaagttaaccagtaaagatatctcttctgtcaatgatatcatagacatacacaatattcaattacaaccaatcttggacaactctttattgttatggaattatccaactggttacttaaacgagacctctatgaaggttaaagatatgttctggtattacaagattaaaaattgtttgatcctgtacaatgatctaaatggagaaaatagtggcaccactcttcattacttatcctttgaaaactcttttgaaaggaataaatttaaatcaaatttacatggaactatccttcaaaatggaaagaaacttcttattgagactttataattgtctccatgattccttaactatctcaaattgtttagttgatatctcattgtaagttataatgtatcgtatccatattctatatttataccaaactaatattatcccatatttgactttgtctctccgcttcccattctcatgttccccatactcattccaaatgatttcacacatatcattagatctaaatgattctttactatctcttatcaatgggttgaaaagctttattgaacaaacagatcttttaaaatgattatgtttgatatctttgttatttcctccaccacctactccatcttctatttggaagacgtgtaacgtttgtttgctcgatatcacacacaaaaacctatcatcctgactaaatttcatattatatatagttgtagaatctaaacctcggcggtactcatttattagcaatccattgattgtactgaatacgcgcactatggtgccccttgtggaacaagtagccacatatttcccatgtggactcaattttatcagttggataggatttttatgtgcttttataatatttgttggaatatagtcactactatctttgctgctgctgctgatgccactactactactattacagatcatactgtcataatctaaacgggatatgtagacttgtcctgacttattaactgattcatatgcaaggagtccgattgatttaagtaatctaaagtcgatgttctcagtggtgtggctgttatcagttttcaaaatatgtgaatcgaataatcttcttggtggattagtgaaagtaaaaatctggatttctttatgagatagaatcactaaatataatctagtcaaaaaaactttgtctactggatataagaaagtcaatttaaagatagattttttcaataaatcatcccatataaagacttgattcagtaagtcgggggaatacgggtctatcttgtcattacccctgtttctattcttctttctacaaccatcagcactaccataactgctggtgctggtgttgctgcttctactattatttctaactattgcagtataatttgtcctattcagaagaacacatttgcctaccccagcatcattaaaagtcaaattcaacctcatttgtatcggataggaatcgtaaatactgacccctttactatgacaacagcagaaacaactgtcatcattattcgtagatacatcgtcatatgggttcgacattagcatctatgtgttgtatacataaatatttatttatctatttatctatctatttatttatttatctctatgtgtatgtatgtatatattcttcgagtatcacttgcttcatcgttgtattttttctgaatgttcctgtatttctaccacttcatataatcctctgtggttaagtacagttatttgttaactgtttacaaaatataggatccactcgatctgcaaatgttgagggaaagagagaaggaaaagggatggggggggagaaagaaacgagggttaaaataaaatcaatcctttaggtttttttttccactgtttgccagacttgtgttaggtccgtactggttttaaaaattgtttttccctttatatattagggcgtacataatatttcttcctttttcctgatatttttccttttttttttggtcttcgtgccctactcatattacaaatccgctattgcttaattacagaatttttcaactaaaaattaaaatgtacatatttatatatatatttatatacatttatatacatttatatacatttatatatatatatatatatatatatatatttttgttagaggtaagtatggcaactttatttgtttttttttcctttttcctcttttttttcctttcctttttcagctggtaatattttcagcggttaaaagcaataacaacaaataaatcaaaataaatcaaaataaaacagtggaacatatctacgttatatagtcagctagtattatttcctattattttgtttattactaagaaccacctaaatatattttgtactttcataaaatattcaactttcatcgcatctttctaaccttcttttattgcatcaatcaaaaaggggaaaaaaataacgttaacaatattatacatatatatttagattttacaagaagttactactatatttataacagtaaaagatttttagtcgtcacgaaaacgaattggcattgatctttattgatttttttttaaaaaaaaaaaaaaaaaaaagaaataaataaataaataaataaatagatagatagataaaaattctatattattaatcttttattgatattattagttatttgcaattccaattaaatatttctctaatggatagatttatcccacaggcaacatcaaaagaggtttataattacaaaaatcagcttttgacaaaaaatagcaaaagcaaagggcagaaccccatctctgtcgattccgaacaaacatcaataatatcaacaaatttttcccccgacagattttcttcacctgatatcctcttcaacaattcaataaatcattataattccattggaatgatcgatagtgataacacaaataccattgacaataacgataacaatacaactgtctctgatggttctccatattcgaatgaatcaagcaaaataacagcacaaatttcatcctctaatctatattacaagaatcatattgctaagagtcttggttttagtcattgggatacaagagtcttgaaatatagaaacgagaataaactgtctccaagaaagaaaaaaattaagagtaatcatatcccacaagaagatacaccactgttatttaatagaagaccaaataaaagaaatcaattgaaatctcatatcccatatagagtactagatgcaccatgtctaagaaacgatttctattccaatttaatctcttggtctcatacaagttcaaacatcttggtcggtttaggttgttctgtttatatatggtccagtgataaaggtgcacaacaggttttgaaacatgattttttgaataaaagaaatgattgggttacatgtgtctcatttgcaccaaagggatcagataaatttattgttggtactaagcgtggttggatatatttatttgatcaaagaaatctcaactctgggtccctttcttcctcttcttcttccccttctccttccccttcttcgtattcttcgtcagatactgctatttcgccagatatttcaactaattatctaaatgacgacaatcaaagtaatgaaatcattggtcggtttcactctaaatcaatgaagagcataacttgtgttgaatggctcaacaaaaataagaaaagaaacaatagtggtagtggtagttgtagtaatattaatagtaataataataggaagtgcactccttttcaagaagggtttatttttggtgaagaaaatggatatataaatttggttcatataattaatgagcctgtttcgtctagaattaagttgatatctcgatttaaagcgcaattgcaacaggtttgtgggatgtcactgaattttgatgatcaacagatagctgtaggtgggaatgataattcatgttcactatgggatattacaaaccatatgaaaagccctgttctaaaatatactttttttcataatgcagcaataaaagcagtttctttttgtccatggtctaaatccttattagcaacagggggtggtactaaagacaaagttattaaattttggcatacagagacagggacacttatcaatcaaataaagacagataatcagattacttccttaatatggtcgcaacattataaacaaattgttgctacatttggatttggaaatttaaataaacctttactattgactttatatacgtatccaacgttagaacccattgtacaggtccaaataccacatcccttaagggcattaagtagttgtatttcaccagatggttcatctatttgtattgctactactgacgagactattagattttatgaattatgggaaagtaaagaggatatcctaataaaagatttgcaagaaaatggaatctatggttcctcattaattgaacatcttgaaggtattaactatcctcgtagaagaactcacaatggtagaacaaaccatctaaggtaaatgtgagaattttgttgtaaattcagaccctaataatcctggtgagaaaacagtcaaacagtctcaatcaatacgtatacacatatgatcctttgtacatctttatatacattcttacatacactaacatatatatatatattctaaatatgttaaattagtttatacgtcagctcttcttattttttttttttcaatcatcttctccactttattatttcattgattttccaattattttgaaatcttcaatatttttataaaatatatttataaaaggcctcgagctgcaacagaagttcaatgaataaacgaaattagaaagaacgcagacgattatgcatagtcagaacagttaagacttgtgaataggaaatagaagatcaaagaaagcctatttgaactgtatatccaactatatcactattactgtattttttttctgccttttacctttttttttcactaattgattttctggttctataattatacactgaaggcagctatactttaaactgataaaagatcaataatgacttctattgatagcaaagagaatgataaaagagatgaattgtcagaaaatccaaaagaatcgttaaatgctcaagttattgcaccaggaatcgtaaggaatatcaaaaatgaagtaatcacaggtttttacattaatattggtctttatccattgatacttatttattttattgtaacatttatttatataaccagaaatgttgtgccataccaatttattgacgaaaaatttcatataaatcagactattacatatttgaatggtaattggaggcaatgggattcaaagattactacaccaccaggattatatgtccttggttgggttttccatagcacgattaaaccaatatttaaatcatggagtactctgacaatattgagattagttaatctgataggtggtattttcgttttacctttggtcgtattgcgaccattatttctctttaatgccatcgggttttggccagtgacattaacctgtttcccattaatggtaacttactattatatatattatacagatatttggtccactattttcattctagaatcgctatctttagtattagcattgccttttggtaatgctaagagtctttgggccagtgctctatgtgctaccataagttgtctgtttagacaaaccaacattatatggtctggatttataatgatccttgctattgaaagaagagcgatgatagctaaacaatttactgatcagactctaaacaattatttgaagttatttatattttcaattgaagaatttaaatctttggtacttccttacttcattaatttttttttgtttttcatctatttgatttggaatagatccattactttaggtgataaatctaatcattcattgtccatccatggagttcaatttttttatatgacattttttctattattgtttagtgtgcccatctggtgttctaaaaatttcctcagatcttataagttgagatgtcaattaagacctgttaaaacattttgggaaatcgtggggatcacgttaattattagatatttcactaaagtccatccattccttctatcagacaatagacactatacattttatttgtttagaaggctaattggtaattctcgtaaacttatcaaatatggtcttatggctccaatatatcatttttctactttcgtttatatggagttaatgagacccaatgaattgacattccatgcaataatacctataccaataaaggaaacaattcatctacccgtacaattaactcacatatcatggaccgcgcttctgttatgtacttttttaacaattattccatcacctttattcgaaccaaggtattatattttaccttatttcttttggagaatttttattacgtgtaatgctgaacctatcttccaagatttgaaaccttcaataaactcgaatgaatcaccaattgtaattagttctaccggaagattgatatgggaattcctgtggtttatgttaatcaacattgttatgttgattatttttattaaatatacttttacatgggtggatgaaccctttttacaaagaattatttggtagctgaattataaaatattcgtgcaaaactaatgaataggatgataaggactatgaaatggttaagaaaattaaagttcatatatatatatagatagatagatttgtggtgtgtaatgtatgctcaagtaatctctaattaaataaagttataatataattatgaaattaattatagtatgaaagaatcatttattataattgatgttatattagcttcagttttaattgtatgcgcatattttgaacgtttgtggagggggggtagaaaatattgtgtactgaatgaagttggtaattgatatacaacttgattactaaaatcaaattattataaagaaacataaattttgaaaaaaaaaacaggaaaaatcatcaaggatgtatcaacaggtactattgaatgatgcattatattagtgacagctacactttaataatgaaccaatactcttaaagcatgaactatgaatagaaatttttttttccataatataataattatacatctccaaagtttctctttcaatcgtgtataattattaccatataaaatccaaaaaagtaaatagcattaacagacaccttacttacttattactattattttatatatttatgatgtcctcaggttttagcaacactgtacacacagcttcatataaggaagaaaaaaaacagtaaaccagcatataattgagtttaaagtttaacctcaaaactaaaacgattacatttacataacttaataattagaaataaaaacaatcctatataataactttttatcaacatttttagaacaaacaaatgttaagcaaaagaaaaaaaaaattataaaatggttatatggagatgacaatattattcataacattagactttaattacaatgcaacattctcaaattcatttgtaacatcttcaatttttttatcttgatcctcttcattcttttccttatcgatagaatctaacttttcatcattttggccttcttcttccgcttcctctttactggctccttcatcttcaactgagttatcttccttagattcatccattaatgcatcttttggttcatccttcgattcatccttcaattcatcttttggttgatcctttggctcatcctttagttcatcttttgattcatcttttaactcatctttagactcatcctttgattcatcttttaaattatcctttgctgtttcttgaatagcttcatcttgattgttccctattttaacggtttctttaatatcattatttacttcgctatctctgtcattgttatcttcaaagtcctcttttggttgcgctagtgtgtcatcatctatattaccactgtcttgtgtcttgttttgctcttcatcttcatcctctgttattatggcttccacatcaccttcatcgtctacttttaatgattcctttgatgtattaatattcttttgaacaaacgatgattttgtcggttgaataccaattggttcaggggcaacagtttgcaacagctgtggattgttattttgttgtatagaaggtgtagcaccagccatagcattggcagtagtagtattgatgacagtggtagcaggatcatgagttaaactctgtttatatttcaaaatgaccctcttctttaagacttctaagtaatcttgtattggaccaccattttgtttatctctaaagactaattctccatccccagctaaataatcatcactctcttccacaagccaccaattaccttcctctaagtcattcgcaaaggacaataggaattccccccagtttttagccacgacgtatttactgtcgaagtctcttccgaaaataataacttgaccacaaataccttgtggaccaggtgccaaatctacaccaatatgatttcctgcatgatccgtaaccatggggatccattgggcatgtgcatatacaggttgaacagagtctggtgggatggatttttgttgtggaataaatggtaatttgaattgatttctctgtgtctcagtagacattgaatttgaatttgagataaaatcgttcgaactactattagtggcaatgtttatatttacagaatccgtgctattgtccatagaaacccttaaagatgttgattgactattattaataataatattattattgttattattattataattctgatgtcttttcaaatttgatgcaacatttctccaggcttgagtcatggccacaatttgatccagagtcattaattgtaacccatatatcaaaccggaggtaccagtcatggactctaaatcctcttgaccgtcatgtatacgcagggacacttttacagaaggtggtaaagagatttcgagatcttcttcagcctggtttatatcattattagtgacgggatcacccagggtggcatttaaatctgggttgtgctcctcagtccaggaatcgatgtgtctccatgccaataggacctctgagacaccttcttgtccaccagacatgatgctattcgtgttattgatattgtccagatcatcaaaatcgattgtatctactggatccaaaccaatattcatttcttcatcgcctgttaaatgcaaactggatggattaccatttcctttgcccagatgtgatctggaacggaatcccatattaaaatttggaatattatttggatcatactcggcatagtggtcctctgtactaaaagaataaacccattccttaaatttcttcttaaaactttgcatcttctaagacgtaaaaacaaactaacaaatcacaaaaaaaagaaaaagaaaaagaaaaaggataagaatcctttaacctaaataaatcaatgattagcaggaagcaaatacacttttgaaaatatttccaatagtatatatagatatatgtatagatatgtgtattttttcccccccctttcttccttactactattgtctactaatttccttattttattttattttgttttattttattttacttatttaataatttccccatcttcgatacaactgatattaacctccactccttgtacacttatttattcagttcattcatttattattcaaagaattgacaatataacttccatttttctcgagaatttcgatcgatcgatcgagcagaaaacaaaaacaaaagaaaaaaaaaaataaaaagaaagaaaaaaatttttttttttgagaatgaaaagcgcggaaacagcgggtttcgtttcaaatgataaattaaagcggttttcaattccgcgggttttcaacggatataaaaagaaaaaaaaaacagagcagccaggcctttcaaaaaaagtccgacgtcgccatttctggacacaacatccacacactctcaaattgctcttctttcatcaacaaaaatagttaatgaatattttttaggagataatatattcacaagtttatattattagtaagtaatacgtaatagtaaagatacatatctatacttttattcatttgttcaaatagatgaagtaaagaaaaagaagaagagaggaagagaaaaagagagagagaggcagatagataagactagtatcccattgaatacttctctatttcttcttttcgtttattctggaatcaacagtagtattcaacaacaacaattcattatccaatatgactttatttggcgatttcgccaggatattagcaatctcttttgcagtatctagtctcttcaattcaacgtaatctcttgattttttaatagcttcaccaatcaactccgcggatttggcttcaccctgtgccttaacaaccatcccctgtttctcctgtcttgctttatctacaatgaaagctgctctttgcgcgtcttgttgagcgatttgcttggcctccacagcattagtaaattctggtgaaaatgtcatataggtgatggatacgtcatccaaaagaatactaaatttgcttgcccgacgaaccaaattttctcgaatcaattttgaaactttctctctctgcgtaatcaattgcgatgcattaaactgtgctaccacagatttcaacacctcgttgactatagaaggcaacactctttcatcgtagtcctgtcccaaagttctatatatgataggcaactggctcacgtctggtcttgacaacactctacaagtgatgttgaccatctgcaaatcttttgtgccagtcaaagatgcaacattacgtggtttcgctctaacatcatagataatcggggtctctaaccatggcaccacaaaatgggtcccctcgttatatatcttcggggagatcccgcctattctagaatacacaatagctctgtgaccaccatccacattgaacagtgcggaattggccagtaatgcagtaccacccaacaaaatcaaccctccgagacccgcaaacataccacccagtgggttaccacctctgccacggccaccagttctctgtacccttgagacttgttgttgaaaagctttggcatatctttgaaaatcgttaggaccattcattgcaaaaaaaaaaaaagaaacaattaataataattataataataatgataatgataattagaatattttaaatgatatgtaaatttttattacgcccactttctattctccttttctctttcttcctttttaaagtgaggcaatagtgaacgctagagtacagaccaaatgtaagtatagtttcagttacgcatctgactactccctttccttcttcttcatcccacttgctttatttcattttattttatttttttcctctgcgttttgcaatttttttttgtgttgaaggggaacataaagaaataaaaaaaggggaacggtaaaagggaaaaccacaaatgccgtatgcggatatatcacggaacttaggtcgcctgaacctacaatggtaaaaaaatcaggctgtgcaatccgtccaaacccgttcttttgcgtttttaacgaataacccaccctgaataagaacttgaatatccataatagcggagagtaatctatatattactttaaaaacgaccagttatataatttgtaaatgtttacatatatatatatatatataattaatatctgtatattttttatttggaggataccgcagcttttgaaaactgagcggatttccacggaataccgaaatcgcatgcaatctctcggaaacaaggaatttggaaatgcacagaccccaacttccgcacataccggatgcaaaaattccgcactctttgcatacccctaaaagtatggcaaaaaccatcttaaggaaatgaaagcatgccaaatgagaagaagactgtgacacttttcttcaagaaaagacgttgatctactagtcgagccccactattatagatacaactgctaccatggatgctgcaacaacccccatttcaattcacactactactcggtctgttcaactttattgaatcataacaactctaaatcaaacacagctacaactcccaccactccccgcctcctcacacacacacgcacacacccacatatatacatatacatatacatatatttatttggttactcactttgaagttttgtcatcatgtccgatttccctttacatgaagcttgtatgaataatcagttagataaagtaaaacacttggttagtgaatcagatagcattagacgattgcttagacagaaggataatgacaacagaacaccgttgcattgggctgtatctttccagaatgaagaaatcatccaataccttttatcacacatgaaatccacagatattgacgatttaactgatgaatctggctggaccccgtttcatattgcttgttctgtaggcaattataatatcgtcgaaatgttgtacaatagagacatcaagccagatatcaacttacagactggccaggggactactccactacatttagccgtcactaaacaacactacctcattgtggatttcttaatggaaaatggtgccaatttgcaaatcaaagacaataaaaaacaaattccattacacagagctgcatctattggatctatgagattagtagaccttctatgtacacaggggtctcctatagattggaaagatactaatggttggactcctttattccatgccttagctgaaggtcacggtgatgtagctgctcttttagtgactaaatatcatgcttcaatcgatctagaagataatttggggaagaaacctattgatgttgtattgaatgatcaggtaaaagattattttatcaaaaatatatgaatacataataataatatgtatatatatatgttcataatttatctctgttaatcacaagtttagaatccactagaataccatttaccttcctgtctgcatcagtataatccatactaatatctttattcccatacatagaaccaatcaataacaattcttgattcttaatagtggttcccatcttttcacagatctccaacagaacatgtggtataatcaccccaaataaattgttatttactgcaaattccaccatctctctaatatgaatcttcttatctatcatatcgactcccttttcttctccctctccttgttctatcatactttttagtctatgtggtgtatctaaaataaacctactgtctttgtacttatcattcaatattaatgaattcatctctaataacactgggaaattaggttgcttccaattcaagatagagcaaactttccaattgcaggaactgaaaattatagaccttaatataccaaatgtatgtctcaacattctttcatgttcaaacacagtaaacagaattctatcaatatatttgtttaaacctgtctcacttgaaacatccttcacaaccaattctctttcattatctgtaggataacacacttgaataactaactgtaaattgtatggaatcaattgtagtaaatctttaaacagtaaagttcttgtattaacaacatctaataacttagtctcggtctctatatcttcagctttaatatcggatagattatcctttgataataagacgtttaattgtgttttattcaaacttgacaataaaaacttgaccccattaaattcaataaaacaatttggtgatgtgactaatgtaccatcttctaaacaatgtattttgatcttggtaaatgaaccatagatagatgaggatgtaatataatgcggcacttgtgtattaataacactattattactattattattagcagcagtagcattttttaacaacggattcccaagagtaaaagatgtcagatcgtttgaaattacagtatctaggttattagtaataatgctactaccactattaccacacccactattaccattattagatgtagatttccagtatggctcgtatttatcaatctgcaaaggcctaccactataaggaaaaataatctgatatctaaacttaaagttaccaatgttgttcaattttgaatcaaacaaaggtaaaaaaatctcatcttgttgatttttgttaaatttttcaaataaaaatggcatacatgtagtttttgcaatcaatcgggtaccaaattctggataaatctcaaaatcaactactaaatcttttaaagtatcaacttgaaatattacttcattagagccttcgaatatattctcttcttcacatttaccaaggtaattgcttccattaccccccatactatcatgaagaataatgttccttggtaaattatctggatagtttgaaatcaccgtcattcttcctgcatcaggaacaacgatagtctcatctgcagaattcaagtgaatgcatttcccatttctttcaaagattaatttaacagatatcttctgtattaaataattatgaccatacttttttaatgggattatcggaggcggcaatgcaaaatctgggatatcattcaaactatggtctgaatcattcaattcatctcctgacaatgagaaactatcaactaataaaggaacttgcaacgtctttaaagtagtgtctactacattaaattcgttcttcttcttgaagcattttttctgcatatacggtaaaaattcattaagaacctctacatcgctctcccaaagaacataaaacattggatctcttccatgttcatctgtaatctcaatatcagcgccattatgtaacaatactttaacagctttaacattacaagcctttatagcatagaaaatcggactaaacttgttaaaatcatctattccattcgggttcacagcatgattaattaaaagtttaagtaaatctgtggtatcctcagccaatctacttgtaacatgcaaggggcctaatccctctgtattgaccaccgtattaatatctattccatttgctttaaaaatatctaaaataatttgtgtagctttaaaattattatacttgcaggctacgagtaaaggtgaaaactgaaaattttcaggactgatcaatgatttcaatactacatgatttttcaataattcatatatgatatcaatatgattattcttaattgcaaggaccaaaggcgaatcataatcatcatcaattgaattaatggtatgatcaatccctctaacacttaacaacagttgaacacaatttaattttcctaattctgccgcaaaatgaaggggtgttcttttatgaatttcgactgcatttaccaaaatttttaatgtctcctgtgaaagtgttttcaacacttctctaataacgaaatctctactatcactagaacagtgtgtagcctgatgtagtatatttttcttagaatatgtctgatcatcctcttctaaataacctaagtcgatcatgcttttaattgtactgtaaaatatttcaagatcagagtctttcatctttgaaccaaccaataaaagaaatagctttgataacaaatcaacaattggttggttatatgaatattttgaatcttgtgacaaatcattgacattattgaaaaagggtgcaattttattactataaaaagttgccaaattttctttccttctatcatcatcctttaattttgatatatttattagttccaaataccattcttcaatctctgaatcaaaatctatataattgttcaaaacgtttggcgttgtaacgaaggcttcggatggagttgtgagattcatgggactcaaatcatatttaaaggaatctacaagtggtgtcctagtactaatcactgtgcttggagtgccatttgctagagtggttcttttattttccaaatttgttgaattatcatcatttgttgtgttattattttgtaaatcattcaattccattagaatatttaatgtttcatcatttaatttagaaatatctattctagtgaaaaccggttgaacagataccacggtggctagatagaaatctttgtcttgtgaatgagaccgtttatcccatttttttagagccttcgaaaacccagttttgtttaattccacatattgttcaaaagctataagatctttttggaatttaataaacctaccatagatagatttgaaagtcaaactatttctggaattgagcctcccattcgacctataatttacatattttgaataaaggatgttgaatttaatctttaaatctgattccttctgtaaataaaatgaattcactttctctaattctctttccaatttaaaaaaaaaagaagctttattattttgtaaccttttgtaactgtttggatcctggaatggattatcatttgaatggaagtttatactgttaacatcaccagtgtttaaggagacatcaccattaggcaaactcaattgtttaatcaattttttcaaagccttataatccataaaatagccggtatattcaggtagttccaattctctaccttctaaatatttaccaaacttcattatcctaaaataaacaaacaaagaaatattcttctcctagtctttgtccctcttataatattcttagtttctttcttttattttattttattttatttttatcagttttagtcttttaatttagtttaagacatcaatagaataattaaatgattataatatttataatattgattcttgcaaaaaaaaaaaaataaataaaaatagctggtacaaaaaatgtagttctgttaaacagacactttttagcaagtcttcaaataactaactaataaacggtttaacaacaatgaaaccaacagagtgcaattcaaaaacaaatgaaaagtgcagtaccttaaacattgcacactaactgaatactctgacttagcttgaccgattcatcgagccaaagatccacttaaaggaaggagaagccatttgaataaattccttttccttattgattcattccatattaaagcaggaaaaggggtacacgtggcacaacctacaatcactgcgatacacccacaccccacacattcaccgagcggggtagggttcagtctacagggccatcagaatcgaaaaacggcagtgtaattttttaatttttagtggagaccctatcatatttattgaaaaatattcatttagaaatgataaccctagtatatttccttcagttatgttaaaaataaaaaacacaacaatccaaacctaaaaagaagataggtcccaaaaataaaataaaatagacattatcattatcttttgaaccagatagttcattcaaacactgatcccctatatattctagtcgatggcttattagtatcttttgttatacaacaagcttcttctttcttaaacaataaagtgataacgactgcatctttttgttatacctcttcaaaatcaactattttctttcgtcctcaacatcattctataaggtgacatacctctagttctaatacgataatatttttgcatttcttctcggttttttttaattcagttggctgttaaatacctcatacactagctagacaactcacatgtcgcgtttgtctgttcttcttgtatataaaccatcaatattgttataacagtcgtatatactctctctgttgaaacagctggcggaaaaaagggaatttatgttattccgccttcggattttaataactattaaatgaaaagattacctctatctatatatctaagcactactgttacatgccattttaataatgggtaaataacagtatatatccacatatacatatacatacgtatatacatacatacatatatataaacacttttagacatatccagatgctcatcctcttacaataaaatatttaatggtgcatgtgtttgagaatttgaaatttgttatcttaaagaatcatgatgactccactgaagaaaaaatatctagtttgttaaaatcaaatggatgttccaacttgcaactaacatatcctgatacatttaaattacaactatatagcacatcaaaaaggcccacagttcattttgttgtcactaattctatcccatctaacgatatcgccctgtcatgttttaaattatctattcctgtggtgaatatagattgggtcctcgaatgcatcaaaagggagaaaatagttcctattgaaccattccaatatttttctaatattttaaaaaatcacaggttttacatatctagatactccttcaatgagcaagaatataagttccttcgcaatctgatattacttctaggtggagatgtgactcgtattttgtctaaacagactgtgactcatttggtactgaaaaataataataccatggagaatgatccacttaaacagctgttacccattctgaatcgtcacccttataacgagattgaagaagaaattcatatagtcgacgaagtatggctatttgacaagtattttaacagtgaatacggtaatacaataatcaaaagtgttaatagcaacgaagaatcgaaagattacaatccaatatttcataaatcgatgtttgatgggtacgaatttttaatggatctccaaatggagatgccactaattaaccatttatccactatgattaaaagttttggcggtgcgatactcttgtatgaagatacagaggcagaaaagataccaatggctaacagaagtaagaaaaagttaatatatttgggtgaattctatggaaatccattgttcaatagtatccacacgcaccatgatattttgaaggtgaatttaaattggatcttccaatgtatattacaacaagggatggatatttttatagataaggatggccacagtaagatgatttataggatccccaatcagacacaaaaaaaactatgtagtggcatgaggatttcctatacacaattctttgggttacaaagatttgaaatcattgataagattgaaatgcttggtggtgttgtgatgccaaaccttgatctaactacagatcttttgattgtggggatttcaaggggtcccaaatataggtttggtataaaaaataatatacatatggtgactccatcatggttagatgtgacttttgaatcttattcaagacaaccatttgaccaatatataccatcttgtgaagatgatgaaaatctatctttaaatgtcgatgaaaatgttaatgaggatgtagttataacgagcagtccctctatgataattgaggaacctgaagtgaagggacatgcaactactgctagaatccaagatcaagaagaacgtgccactttcgatacaaccaaattcaatactgaatccgcaaaaatacatgatagcaagtcttcaaatagattggccagaaaagaagacgaggaagaggaagaaaaggctgctagaaaatacatagtgaaaagaacaaacaagagacagaagatagaagacaaggctagggatacattatttagggatggaatgaaagaaattggacctttatataacatacattgtgtgaccacccaatgtcttgatggattaacaaatctagataaagagatattgaaattgatcgggattgagatcttcgacaaaatcgatgactcgaatattaagttgttgaatggtgtaattgcaccaagaagacttcgaacattcaaatttttgttgagtttaagttttgaaccactagaatatgcattgataccagaattcataacggatatattagccatagtaaaaaacggccaagatttgagcgagaaatcattgcgtttagacctaaagacatattgtatcccagagatggatacagatattttacagaggacgaaattaccaaataaagtgttttcaagaggaaatattataaacgtcaatatgtcgtctaacatgcagggcggtactgagactctaacaacgatattaaagagtcatggtattaagaacataaatgtattgaaaaagaaatttagtataagcgatatagtgaagaatgagaatcatttagcagataataaaacagatggagggaataacgagacaactaatgaaattcctcaatacattcttatcactgatcaacaatcacaagtgaaacaattcaaaaaaatcttgttaaagaacgataaagatacgaaaggtatattcatagtggaatggaattggtgtgtacaatgtatttttggccttgatgtgtcgtatagtaaatacaaatcaaccatactgcataatgaataaaacaaaagggggagattatctgcatgtcatcatagactataaatagatatatgtttataatagcttattaattaaaaaataaaaaaaaaaaagataggagaaaaaaaaaagaaacaaaaagcatttttctgaccatccacaatgtttaggtaagggtttatagagatgaaaagcttcaatttttctcttagcgacttaaacaaatatagggtttcagaaaaaccatccataaagaaacagggaaaaacgaaagggtctaaaaaaaaataaggctgccaaatgaattgaaataaaaaaccctactcttttttgctgccactgtgaaaaaaaaaaaagaaaaacattatcatttactttcctttccatttttccctccctccctttcctctgtttttctattgcgtgctttctactcttacaaacgctaaatccgaatgggaaaatctaatttttttttgggggagggcagagaaagaaaagaggaaagaatgtgctaccgccgtttgttcttctgttctcgagaaaagccacatcaacagcaaaaaaacaaaaacacaaacaagttctgtactccattgttcgggacgattatctaccacctcgagattgaaattgtctctctctcctcgagctccgagaaatcagcttctttttcgttttttatttttttttttgactagaagagaacacagcacaacgtgaagaacgacaaatcgagagaacgacaaaaatagtgcgatgcagaaacgacagaaacaataattagtaattattgtcttcctcttttattgtctgctattgtctctttccatggcaagaatctagcagactatcattttttttttgagatcttctgcaaaaggcctagtgttacttattactagacaccattaaaaatcaccaggaacttttattctgtaccagtgaagtttcgccatggagttggacgacccgccccccctggttcgttagcgttgcctgcttctattgttatttcgttacgtatagaattctattgccaccgttaacaaatcctttgaatcaacggccgccatcaccactaaccactgcaacttagtacctaagatctatggtttattgttttttctattttcccctattttctttttattttctgctcgagatgaggtcaatggatttaacggattcaagtgaagtttaatcatctttatgatcaattaatttgaacagtatacgttaacatgcacatacacagaggtttttttctctctctctatatatataaggaggtagtcatcatttagaaccatgacaaactcttggctcctcaaactggtttttcaaatacgtttgattgttgtaaaagtatacacaaaccgcaagaataaccataaagaaatagagagacccatccgctattacctttataaagtcaatcaatcgataacccaaacttaaatacatatatacatctgtatttccaccctctacctcaccctaaaaaacaaaaagaaaaaaacaaagacaaaatgttatctgctgcttctaaggaaattgttaaagctaccgtcccggtcttagaagaacacggtactgaaataacctctacattctacaaaatgatgtttgctggtcatcctgaattgttgaacatcttcaacaggacaaatcaaaagaagggtgcccagcaaaccgctttagctactactgtcttagctgctgccaagcatatcgatgacttatctgtcttgttgccacatgtcaaacaaattggtcacaaacaccgtgctttacaaattatgccagaacactacccaattgttggccactacctattaaaagccatttccgaagttcttggcgatgctgctaccccagaaattattaaagcttggggtgaagcttacggtgagatcgctgacgttttcatttctgttgaaaaggaaatgtacgatgccgctgcttggccaggttggaaaccattcaccgttgtcgaaaaggaaaaagttgctgaagacgtttaccaattcactgttaaaccagacagtgatttagttctaccaaaggttgtccctggtcaatacatcaccgtcaacacccatccaactagagataacaaccaaaatgatgctttacgtcactactctatttcctccattgacacttctaagggcttgaagtttgctgttcgtttagagactagtccaaacaatccagctggtttggtctctgaattcttacacaatgaggttcacgttggtgacaccatcaaattaagtgctccagctggtgattttgcactaaatgaagatttggttgaacaaaacgaaattccattagtcttattagcttctggtgttggtgtcaccccattactatctatgttagagtaccaagtcaataacaacccagaaagaccaattgtttggatccaatcctctcgtactgaagctaaggaagcctttaccaagcacgtcactgaattattggccagggctaagaatgtcaagagatacatcatccacactaatgtcagcaagcgtattgatgataatttcttgaaggaaaatgttccatctcatgcagatgtctacatctgtggttctttacacttcatggagtctatgattaaatacttacaagtattagaacacaaggatgatatgatccactatgaaccatttggtccaaagatgagtactgttgaagttggtttaaagaagaactgaactgaactgaaaaataaaataaagtaaaacaaaatttttattcagtgaacaaacagaaagacttctttttattgatctcttcccctcctttctatttttttattattactctgtttccatgtaatgactaattcttataaagtaacgccttttttaatttattcattctatatagatatatataaaataatatgtacattaaaaaatatgaatgtcttattagaattctttgccaggttcattttttcctcaactctacagacttctttataacttattgcagagagctttttgaatactctttattactatttttaaacgacggtgtgatatatatagaacaacaacaaaatatatacatatatatattgacaaacgaattatatacgttaaatgtatacacctatatttacaacatcactctctggtatcatccattcattgtatattttgtatttgtttggctaaactattatttactactattccaccagttagagactttagatttaaattctttaacatcttgtaacccttcatttaattccattaacatttcatcttgtttcttcgtccaaacaggaaatttctttgattgccattgatagatacggaactttaaattgctcattgtatttggtaaattataattgaaacatgttaacccaaggattgtaggtaccaatatcctacttaataaagtccttttacgagtcaagatagaacctgccataatactcactacagtgtaaattgtcccaggtaaaagcttttcccttggatccgtgactagcttagatacatcatggtttaattcttgttcttttttttggtactgttcagtaatgtccttcaatttattttctcctgcatttactattgataagactgattgacgctgtttagagatgaagttgaccaatccctttggttgatcttgaattaatttggaagtcgctgggtctaaaggattcccattagaatctttaatttcattgttattagagttatttggctcacgataaaaattcttgctcatattttcttctgtattttatccttcaacgaacaactattctagtccaaaaagaaattaagtatataatgtatccctctttctatttcttctatttttccctccttttctccacaagaccaaatcacaaaataattgacactgatttcaactctagattatactaaggacttgcttctaagtacatcagtcacttttagtcatctcgattctttgtttaaaatgcctgctttgttttagtttaatatttttttctcttcctccttattttttggatcaatttgatttggcgtttttcatttagctaattttttcttgttttgtcatgacacaatttctctcactgtatcattaggtatagggttgctcgtagaaattactaaagttttttctaaacattctagggttattctcaatttttaaaaaaaagcaagacaaaaaaactgaaacaaaaaagactatcaaaccctacagaaaacaatagaaaaatattccatacaggttagttgacataaattaatttagatagatacatatatacatatcgatgaacacctattcacatgatcgatgagattaatctgtaaatattctcttcatccattgcttcgaagttattttgatttgtaagttgggatacatcttgttctttatccggcaacaattcgcgttctttatctaatactttagaagtgtagtgtggaagatagcaatgttttgaatacagggtaggaacaatggctgaacaagtcaggcctagtaatagatatttaaaatggggcatccttaccatcctttgaacttgtgtgtatacacttgagtctaacttcattccgaatttattcctctttctctctttttctatatagtaacattattgtccttcaagtatcacacattgtaaaaaactctaataaataaagaaatgtttaaagaaaatagcaacaaacaagaaacatttatttaattaaaataatttttatccagcaaagcctatatttatctataaatagtcacatttgatatggatggttcttatttttctacaaatctcccttctaattaatctctaataaattgagttgcgccgtttattgcattcataaaaaaaagcatttttttctacccttaaacaaatataaaagtacgtattttctagggatacttggcatatggaaatataatatttctatcttgctacttttcttatttaaacagctttccaattattgatccaaacccagatttcttctttgtctttaatttgcccttacttccactaacaatattcttatttggatcggtctttttagtaccctttgttggtaatttttttgatgtttgatctttactattgttattagataatgaagatgaaatcactgatcctgcataaggtttatgattaagagacaaagatttggttttttttatagatgataatgcagttttattagagaataaatcagaatcaactgtatgattgcttttagtatcatctataattaaagatttcactttatatagattattggctgaaccaaccaattgaactctagaactacgtcttgatgatcttgaagtacatggtgttattcttttaccatctttatcgtaggtaacatcattgctttgttccagcaatatatctcttgaggattttggtaccacatatcctaattcttcaaacagagcgatatttttttgtacttgtggatctatagggaaatagttgtcaatggaggttacagactcatcatctgattcataatctgaatggagtacatgcttcacagattcatactcatttgtatttgctagtgaatctttaattttatatggattttgtaatgtgtattttatcgtattatccagccactccaatctattctttttatttacacttcttgtgaaacttttacattcttctgtcagtttctttggatgaataaattcaaaagggacaataaatacgggcattggataatatttcatcatgaaatatggtagtttaatattaccatttctaaatttaatttgaatgttagttgacactgtacttacaatttgtgcacatggcctatataaaactgctgtctttgtaattgcatcctttattgaatctgttttaaccaattcaacagtaattttaacaagtttattttgtaaccttcctgcataatactccaggatagatattgtagcatctttagcttctttataaactgcttctagtctaattgctttagataatggtaagtctttattcttattactgctatgaataattctggaattttgtgcagcttctgtttgactcttcgattctgtaagttttggtaataattgtgaggatgttgatgatgatattttatcacccataatagctctgattgtttcttttttactcctttttctcctttcagtatacaaaagattatcaattttactctcaaaattcggtatagtagtaacaatcaccaaatgatcaccatctttagccaagttttctacataccaatccacagaagaccaggtataacgctttccagaaatataacagttgatgactcttaatgatgatcctaaatccttttcatcttcttttattggcaacttacttttaaggcccataacatatgatttaaatttgttattttcaatagtcacagatattgctctatgatccactaccggcctagatggataagtgacagccagagtttctgctatttctttattagcttgttccaatttcgtatcttgtcgccattttttgttattattattatatatttctggttttagagaaaatattgtttgtctttgtgaaaagtcataatttgaaatatttgcttcagttgatctaccccttgtagtataaaatgtttctaatttggccaattcttcatctgtcatgccagcaaaagattttcttcttggtccatcattatctggtaagcttttactattattctttagtgattttttttgtttactgactctatcttctacttcattcaagttggagaacagagattgtgtatattcattctttgacccagaattcaactgcgtgttttgcttagtagtatgatccataatttcttctgcatttgtatccatacaagcaatatcaacatctgcaatattttcttcctcaatacgcttgctagagtcttttttcaatattgacattctaggtgatggtggtaatctcttagttaaatatctatccttttcactcaatgaagtttcacttctacttctttgattaaaactattaggagatttggatcgttcaattgttttttgagattttgtatctaataaattaggccttctttgtccatataatggattatactgtggtggaacatgaacatatttattattaaatccaatgtgtctatcactgtttttaattaatcgtatttcttcgtccaaaaaaccaggcaaaagatcatcaaatgatatgtgtttattatatgtcactttgtgattcttggtggcagtaattttttttctagaatcaggagtattacgatccatctgaattgaacactaactaaaaataaatagtaaacgggaaaaaaaattctatggtaaattattccactttatatagttatttaaaatgatacttctttaaagtgcattaaacgaataaaaacgaccaaaacaattcaatggtgttttgttacctcttattgctccttaaaaatgaaacgcattttctataaatctttatatacttatgaaccggttaattttgacaccttgtgacattttaagatctgagaacttttcgttttccttccgaacaaaagaacaaaaaaaacaaaaaaaaaaaaagactcggctcgaaaaaaaggggaaggaaaaggagaaaataaaaagaaaaaatttaaaataataaatataaaagaatacacactaatcggaattattacggaattggttactttccgcaaagcatttacaggcagatttgcgaaaccagcttttctagtcattttcagtctacatattatttcagcataacactacagctacaactccctatatttaaactacaatgtctaatgtgttcactggttaaagccacagacatccagtaatgtttacctaagagtaagagagaatttgcaaaaaaaaatcctgttcaaccatatacgcaatttttgaaaatataattggcaaacagtttaaagtcgatagtcaacatctgtttacccctcacaagcatagattcaaatttttatttaacaaagcatagagaagcttatttgaataacatttctatacatttaccatatatataagtatttttgtttattatctatggaaagattctcataaaacttagacggtttggaaacactttatattacttaacacataaaacacaaaaaaatcttctcaaaggagttaaaaaaacaaaaattcaattaaaaaaaaacagtattttgatgaaagtatatataattaaacttaaaaactttaattttttcaaataaccttcttattggatttatcatataaatatccacaaatacttcaaataaaaaaactgggtcgaaccaatagacatttgcaaactggaaacgtttaataccggaagtgtacatactaattaataaatagatgagactgaaatacttatcccaaagataaaattatacatcaagacctaaaaatgaagataaagaaacgaaaagatataaaaggacaacagtttctgaagaataaagccaaggatttcatcgtacattatttttatcttatttacaatctttgtatataattatttctgtgttgtatatagagaaagaaagcgaagaactttattataattttgtatactaaatctgtttaatataatattgagaatgtttactatatatccaatgaataaaggcgctcattctcaacagttggaatttggagccttcagcgtccatggtaatggtaaacatcattaaattatagatgcttgttgtattatgtactaaatacgtgtatatacttattatatagtgtatatagtatagattcttgtatttacttcagggcttcttttaagtttttcattccttttcaaatctttgaaaaatactgttggtgaaaaataaaatggtttcccatatattattatacattcgtacatcacataatatacagaaaaactaattaaaaataatttgtatggaaatgatagtaataaactctcatttttcaacagtatcaattattgtcttcgattattaatagattatccgtttgatatttcttatgctttccaaataacacaaaaactttaaccatatcatactataagaacgatgttataatttggacttaggaccaattcttataataggactattggacgaatagttaaggcaataacaaatatataaggacgttttatatataagagaattaaaggattattgcttgttctttttcgtattatacaatatgttacatataattataaatcaaccaaacatacaaatttagatatcaagatgatggtcctttatatatgaatcatgggttgatagtttcttatttgaagttctgtaacgattgtcaccgtaaacacatctctcattaattaactcattaatgtttcattttgttacttagtattcaacaatcacatgggatttatcaacaaatcctgagtcctttaaatccaaactagaacgttttcttgacaaccatcataaaaaccctaacaatatttttcaaccctaatccttttttttccatttaatcataatatcaaggttggtctacaacaaacaatgttgtaatatgagatggtgagattctctgtgtattccagggaagtgcaaataatattaatagttattcaaataatcgagacagtaatcaactataatcgataatataattactaaaacggtcttatatactgagcggcttttatcgtgctaatatatttattcaaagttacttcttgttacttgcttgttgttctatttatttttatatataatatgtaaattatttacaagaaaaggttatggaagatgatcttttatctccagaaaatgttgtctttttatatgttttctggagcttgatcaattatccagatttgtacattaatgactttactgattcaaaccctaaaatttattaaactgattcaggtatattagtgaattagtaactgcaccctaattctctaattatggtaattagtaatacacgtgggacttattaaaacaataggtaaattctagatttgccaaaatcttatgtagtcttagtggaactaatctttttattatgcagcatctaatgttgtagcacatgtatggcttattaaaacagtaaatagttctagattcattcagatctcatgtaatcttgatgataataattattctatttcacaacaaacggcaagttgggcggttagtgtagtggttatcattccacccttccaaggtggagacacgggttcgattctcgtaccgctcatgtttttgctatccccatataatgaaccttctgtagcaccgcaaggtgtgatagtactagaattgttagctttctggaactgtgcctgatcaagtcccagtgtaagaaaacttttcttcacaagaatcagattgaaaaattcagcgtttagaaatggtgtttttattttggtagggttttaaaggctaaggatacaaaacgtatattatcggaaaatagatatactttttatatgacttaaatttaaaatgacactaacaattaatgacttaaacagatattatataataaatgaagaccaaccatgaagatatatacgctctaacgataataaaaaaaaagtgaatgattctttttttttctgtataaatatatgtaaactatattttattatagaaagaaatctaaatatttaaataaacaaagattataaatatagaaaagaaaaaaaaatcaaaaaagactattcaaataaataaaagaataaaaagatttaaaaaaattatactaaacaatcaaatattatttttttacataaggcagtatattaattattaattattactagagatgtgaatgatttgaaaaggtgtataaatgcatactatgtaattttttctatttctgtgattgatagaggaggtaagaaatactacttcaaaaattaaacgttaaatacagaaaagattttcttaaaaaaggttttaaccttgtttttcttttcctcttccttcttttcagtaactgaagattgagcagtttcttcttctttcttgtcgacagttggggcttgagtggtttcttcttccttattttcaacaactggaggttcagcagcttcttcttcctcctgttttggttcctcaacagctggggtagtttcttcaacaggagcaatttcttcaactggggcaactggagtgtcttgcttttgttcttcagacattttttcttattatattatataatattatatggtgtttttttttgtttgttttcgatattataattgtaaacttgcgaatgtcaattaatatagggtcaataaatgaattcggaggtggaaagaaatatgtctataagtgagaaaggaaacaagataaaattcctaagaaaaaataaaggtaacttttgagaaaacaattagagaaatgtcaagtaaccctatatatatacatatatatatatgtatgtatgtatatttatttatctataatttggagagtcaaaagagagatatctctcgttaacaataatattttttttagggatttatcgatgatagttatgaaaaaataaacaaaaactaacaaataccattatcatgggaggaagagggaggaggaggaagatggatagatagaaaatacaagcacagccatacatagaagctcaaagaatgaatatagatgccttattagtgaaaaaaaaaaaaaaaaagaaaaagaaaaaaaaaagattcataagagatttgaaatgtttgcaaaaacactccttggtgtttcattgaatagaagacatgccctcaaaaagggaatatactcatacaagagaaaacaaatatctcccaaatttggacagcgtatattgtttctgttcctaaagattctaccaatttcttttgcttaattgtgtaatcaaaaaacaaaaacaaaacaaaacaaaaaacaataaaaaacaatatcgatactcttcgacaatgcccggtttattctgtaaaaggaaattatttttctttttagatatcttgtcggtcttataaactgctgctaaatttggataaatggaaaaaaagaggagacaataaaaaaaaacaatgaaacagaaaatttatagggagcagtttcggaaaaactttgcactctcgaaataaaactattgttttacaacactgtctatttttccaggaaaaataaaaaaatacactatttccattagggttagtattacatattttgtttttttgttaggattttcaaatcttactgtaagggttctaacaaaataaatcaatcaaacggtcactaaaatcaataaatagacaatgtcacaatatatgatcattggaatatatattagtgggttaatatcttttatatatggctttattaaaaaaaaaataaaaattaaaaacaaatattcgcatgtatatatatattgggtatccttaaaaaaattatagaaatttatcattaaaccgttaaatatttttcttattaaaagaccttataggtgctgtatgtatggtgtgctagtagaatatgtcatattattatctggaactagtttgcatggaattggcgttattatccttttattcaaatcaatttcagacccacacctgctgctggatctgctgctacttactaatgtcgcagaactcatattagatgctattgaacaatccctttcgtgtagcttgttattactactatatatagagatattgttgtaatgtacaggtgttgtacttataggaacacgagtagcttggtatactttatgttgttgttgttgttgttgtaatgcttgtctttgcgttctctttttgatttgaatctctgttttcatgatatgttctctgataggttctaataaaaattgcaaatcaagaatcaaatcatcttcagtgacacgcaaatcccagttcaatagatttagcagttgtctttccatcaaattgatatcatcacatgaaaataaaccgtcagtgtattttgcccagtgcttatttagtggtgaagaatcattgtggaatttggcactcagtatcaaacaagccaaaaatagtctatgaaccgtggatggcaaaccctttgcatcacgaggcaagatgcgtttcaatttgtttaagtagcaggctgtagtcaatagtgtctgtgtgtaaacattagtgtatctaactaagcgagtgatgaaggttctaagagatggtaacctttgttgttgttggaaagttttaagttcattgggactacttggtggagatgggtagtggtgttgtgagacggtattgttgtacttgttatttggtaagacctttaatgtcacttttgtcaaatattggatcatttcatccgtgactggtgatttcatcaaaatgtctaaggacttactgtaatacttcatgttaggtgttaatgatttttactgtcagaactatttgtattgtctatggtgtttggcttttgattgggggattctcatgaaagatagacacactgatgtcatatttataatccagtcaaaaaacaagacctgggtatagatcaatgacttcatgttcaagttgacatgtagtcatctatatatatgagcatgaatatagatatgaggaatgaaatatagttcaaggatggttgtcttatgactttgatattggcttcatggacattgcaccaaattctggtcttttcgtgatctttattacctctttaaacaagagaagtgcgaggttcttgttttctcgaagaaatagacttcttaatttctcgatttcgttttgttttttcttctttttacttcactttacgtctctgttttattcagcacgaattgccaaagttacgaaatgatcgatttgctatgttttgtttcttttttttttgttgttttacattcctcaaaaaaaaaaaaaatttaggggagagcagaaaagaaacaaaaaaaaaaaaacaaatcttcttttcgtgtatattaaacacccacacaccctgaaatagtgatccttcatctttacgaaattttcgtggatttcccaaagaggaaattccttgattgaacagaaaacaagaaaaaacaaaccaaaaaaaagaaacacaaattccgcacatttcccgccattccgtcacgaaaaagttccctcacaattcgtgtccgttgtttgtataaaacattgctttatcgttatttacatcaaatacatctatatactcagataaaacatctgccattgcgggtgttgcagagttgaagtcgaagaaatgattaaacacttcaagcttcacaaaatttctctttttattctttttttttttcctttcctttcttctcttaggtaggtgttggagaaggtatttgaaaatccaaagacaaatatgctgaccgtgccaatggaatgatctggatcccatgtcgtatgaactcatctgtgctattcaattctgtaatatattggtccacttttgtcccttggttccgaagctggcaattgatgatctttgaaaaattaaataacccaaaagtgaaatattccatcactagatcaaatatattgatccatccgcctaattggaagtcttcttcaattaagctattgatctttttgattatctcttgaaatttatcctgtgtgaaatatatagacaacggcgatatcgaaccgtatccataccattgtccatctcgaggactcttcccctgacatataaacttatccctagcatttttatcgcttacaataatagctgctggttcatggccaggtaaatattcactaaagcatggatacgttactcgctggtcatacgaacgaggtattcttactattcttgttttcctccattctgttgagtctggcgacacatatatgttaggaaagtgagtaatcactatggaatgtcctgtgtcatgttcctttggtccttcttctaaagaatctacttcaaagtaatatgtctcctgaaactcatgataattaaagaatagaatattattattattattattattattattactcgtactattattattttgatttttcatgcattcatcttgcccactaataccaaacaatgtatgatttatatttttttcgttttgttgattagaaattattgaaggtaattggatattccatttattttctccattcaattctaggtcacatccgttcgaaaccgtctttattattgagctcgtagttccaggcgtctcaaatgttatgttatcgtttgctgaatgttcctccattgaacactcttgctcaccgttcactatcctaaaaaagagtctcttccaatgccatacacaaatgattccaaaaaacaaaagagagaaaaaaaaaaagaagaacacccttacaaaagtttaccagtttctacaacttttgtgtcacttcactttacaaagaaaagtttcgcagatcatcagtttctttctttctttttctttttctattttttttttttcataaaacataaataaaaaaaaaaaaaggaataaatcttcttcttaatgttacaaagaagaaaacacatgcccatacacaaataaataatccaacaggtaaagtgttgatactcttctaaacaaccaactagttatacaggtatacatttgacaatgtctgattgtgattttgttaataaatttttggttctagccaccatcaacccccctcaactttcttcctcttaccaaagacctttaaaagatgtcaagactttaggtgttgcattaccaccattgaaatataagtataatcctcagaaaaggcttggtaatgatacagcaaccgacagtatttcagacggtaaccaaccagccacagttaaactaactttgaaaagtgtaagacaaccaaaattctcaattgaacatgattttaatgtgaatcagaccgttcttcaggtgaaagaatttatccagcaacatgaatctactatcaaacaattaaatcagttgaaattactgattaaagggaaagtgttgcatgattccacccttttggtggatctacctattaaagaacaagacaatgtcattgttaatgtcatgatatctaaacctttgatcccagataagaaggaagagcaagatccagaggacccctcaattgatcaaatattacctagctccactcaacaaaaaactgccgttccttgggatgtcattgaacaggtattaattgatacttactcaactaaacaagaagcaactagtgtatacgaaagattgaaaagaggatgggatttgactcaggagtaactacttctatcacgaccgtgctaaaatatctatccataaatccataattacatacatacacacatatatatataaagtaatagtataatacttgtttattttttctgtctaatgttttttactcttatctttatgctattattccaatttactccagaaagactaattcttttaaaacctgatacctctgagagaagtgtatccataacttcttcattgctcaaacttatattatcggttccttcttgtatcgacgatgtatcatctaaatttttgtacagcatcttattaccaggatcattattaccattattgctactgtccttgtttaacactttgttaaacctagcccacttatctctttgtgatgacacatattttctgactttgtcaatttcctcttgatccaatttatttaatgtcatttttttcttaaatatgaccttttcaaatatatcatttggatttaataatttctttggaaatgtttgaattacttgaaaaaatagcatatcataatcatcctgagtcatatcttctactcttggtctggatcgatgattggcactgccaccactcccatgactgttaatgtgttccaatgattcgttactaaatgtagctaaaatgctctgtgatatagatagttttctttctaataactcttcttcacttaattttaatatggctaaggaaactttaaacaaaaaatgtgatttctcataaaataaacaatcccatatccgaagtgttgtctcaataggcaccactccaacaaagcagctcatgaaccagcttgctgtagataaagtcattggtggcaacttattcaaaatttcaaattgactgatgctcttttgtccagtagtgtttagcattgatgcctccatctttgaccataattcgggtaaatattccttgatacatagaatcaacaccccttgatccacattcactccttctaagttcactgaatgcacaccaggtaaatattttttagtaattataacaagcatccaaaatgctttctcctcacttaaaaacagtaataataatgcagctagaaaattcatcgactgacaatagccaatctctgtatcatatattgaaaatgcaagtaaaactcgtcgtaaagcttgtatcataaatggttcctctttttggaatgactctctatggaaatgaatattgtctgggaaagttctgtttaaatccctttcaataacatctaaatcttgaattatattcttattatttttattttcctccactttctttaacaattttgaatacaaacctttatttttgtttaacatttcgtcacctctggcaaaataccaccatgcattacctctccattctgctggtatacccttccttacatatcttttcaatttttcactctgtggggggaatttctctggtagatcattttttaaggaaagaccgcttttcaataagaaatttctccatttatgtttccttctaatacaatattgagaatattcagaccaccaacgatcatattcttcctcagttataaattgtgtccttttcttaaacccatatctgtcaaaatgttggggatcagtaatatcagatcttcttttcaaagtagttgattgaaaagaacttgccctattaaaaacagaccttacaggactttcctcatttctatctatatataaatcaacaaaactatcttcaactgacactgtatccacaggtggttcctgcagtagttcaggaattcttgatggggtatttgtgtcatgtaattggattgaacttcgattaatggatgcagagcgatgctttgtataattttcaaatttataaaaactgggcatcgatggtgatttcttcaactccctttgttttggtggaataaaatttaatgtattcactttcactggcacagcattagataaaaaatcattgtgtcccattattaacaaatgctcttcttccgaatatcacacctctctatagttgaatatacgctcttccccatatacaggcacactaacgcaaaaagacaatttgaataagggccactgaaattgtttataataatatgtcttagcttctcttctattttcttttctttttttttaaaacctgtattaatagtttgtttctgttgatctcttccctctctgtctgtttgctttgtttattttccaattccacttccacttgtgtcgttcttttactacgtttatttgctatacgaggtgtttgagaaaataggtctgcgaaatttctccggccatcgaacaaaaaatgtaggcactttaaagggaagcaattgtatggggttcatgaaaaaaactctcaaaaagactataagtgttccgatggcatcgagattaaagaggctgtcccagctctatcctaatctctttaataatatactagcttgagtccctaattcacatggatactatcttctgtgtatctcattttattctatttaagaaaaaagaaaattctctttcattttttttttatattttactagtattgacctaaattactaactatgatcagactaaatttgaaactcagattctattcagtagaaaccgccaaggaatggctaaaaaatttaaatacagacactctaccccaaaatatattcaccttcagatatgacaggtctagcggaccaggtggacagaatgtaaataaattaaacactaagtgcactcttactttatataatgcttctcaatgtagcctgattcctgaggaaattagatcacaacttttcgattgtaatcctgacatgttacacaaaaaatttagatattattacccaaactctgattctgtagtggttcaatgtgatgagaccagatccagacttcaaaataaaaatatggttgtcgacaaattgatcaccgaaattaaaagttgctgttatttctcaaacgatactgatccagaaactaaactaaaatgggctagaattaaaaagcgaagtcatgagaaaagactaaggaacaaaaaatacaaaagtgataaaaaaaaatataggaaagttaaccttaaataattaggctatcgttacattattttatgtatatatatatatataaatgttacaatttagatatgtctattcattatcaaaatatcgttaattttcctttattctttttcttttttttaatgctgtattcatttgtgttaaacagatagtggattgtaatcatcttcgtcttcatcttttgcagcaataaaggttgtaagttcagtttctttagtatccttgactttattctttttcttttttattttctccaccttcgatttcttcttgtctttctttttatctgaatttgacttatctttctttctctttttcaatggaggatctggtgagctttcttttgactcattttcataactatttaattcattgtctcccatatcatgcacaatccgacttctcttcttttgatggtagttttcattctccacaatggctttattaagaaccaaatttctttcgtctttaaaatctctttgctttcctttgtattttataacatttcctaaaatgctttgtcccttccttttgctaaatggtatggaatctaattcaaaacatctgtttgttaacaagtcaaatgcaccagcaaaggccttcttaatgtctcgaatattaaatgaaccacgactgatgttgttagtcttatcatctggatcctgaatagctaaagaaaacgaatttctaattggatataattctttccaatctaatttggaaaaataggctggcttcccacccaataaactaatagcaacatcgtcgtaaccaaaatttttaccatataattcgaagaaatctattaataatactcctaggttctctaaaggatcaatttcacctgtaaggatacgtgggtgtagatgtaaaaatgaatacactagacaaatgatagaaaatccacctaacccaccggtatggacattattcaatcttcttgaatgtaaaaactgtttaatgataagaaccaattctcgcaatcctggtgtctcttctaaccattctctaattaatttagcagcctcaagaccattggtcctctcaaaggacacatcgatatgaatttgagtttctggttccacaaatttaataatgggaactctagtctttactatcacttcaatctcggtagctatatgctcatttttaagatgttgggccaatttataaaggcatgttctagtctgtttatcaccaccttcactgttaactacacaatcgatatctgaaccaggtaaataaagatcggtggcatatgatccaaaaacatgtaaatctgcatcaggccaaagagatttgacagcttgacgtaatttacttatagtgatgtttctagctttaatctcttctttgcttggtgaaatatatttaacaaaatcgtgtatttccaatgttaaccaatcagcaatttctgtctccttagaatgatcatgattaatcgtccatggataatctgatgaagtaatagctgtttcaatcttgcccttttctagttgagattcttccagtctattttctaattttgaatcctgcaattcatcgctatcgctagacaatgaactattagaaaatgcaataaaatcatcattttcttctaatgaattatgcttgggtaatgataaatttggtacctcactagattccttagattctgtttctgtagggttatcaaagtgcccgtcatagtcatcaaacccttcctcgttatcgtcctctatgagaataaaattatcttgatcaagaaagctattattccccttgccatcattattatctttctctttctccctatctatctcttctttttcttttagttctccttcttcaattaaaatgggattatttactattgagtttgtttctatatgagatgtcttggacatatatgtttatataattttcaaattacttcttttttattaaaatcaacaattttatttgtactgatattattatatttttcaaagagttgattcttctgtcattcctaatgtgtgccttattacctgaccctagtgctcatatcattatgtctaactgaattatatggtttgtaaatcttcttaaacttttcacattcatggaaaaaagtcggaaaaaaaaaactcaataagtaaatattctgaagatgggaaaagcttataaaaggaacttaaactttttatgataccaatatctgtcaacccacaatataaaattagagaatatatatatatatatatattgtcataaagtatacgtggtagaatgcgttcatatttttatatttatatacatacatattgtctcgtacagaacatactatacacaatcattgtaaaccatattaagttactaaactggtataatcacaaatcttacttgaatatagtagtgaaaaattaaaataataagacaatttatttgaaagtttctggaatgtttgatggttgacaaagccaccctagtggctgttttgtacctcttccttgatccattattctatgattttctaaaagttcaataacggtctctaaatcatagcccttggttaatccattttctatagctttacataggactctacgtctagaataccttttactaacagcagggtcctttctccaggcagaatgataacgtgagtccatttctttcaccgatggctgtcctttgacaccctcagcatactcttgccatatttccttcaccgaatgaggggatctaataaatttaaactgatggattggttttaattctttcagagattcgtttgcttgatacctaatttttcttatccttttttcattgtgggtcattgaagctggaatactgttgacttgaacgccagtattgcgccccaaaggtctatccaagacaatggaatcagtattattgttgttgctatgaggcttcggaagatcttttgaatgactggcagtattaggatacttttcaatcgaaccatttaaaggatcgtaggcctctttagcaaaagatgcattcatatctattggaacattttgactctgaaaatcgatctgggcccctattggatttgttccagtgacagtgattggagtagaaatactagaagtttcattgcttaaaatctcttgcaaaagatcttctgtgctgtgtgcgttaaataaaatatgagtattgtttatcatactagacacttctgtctgttgatactgttgaggattattatggtgattatgatgatgatattgaggtgtattatcaagatatgctatctgagaggaaatgccagtggtgctagtacttgataatttttcttttaaaggaccagcgccctttatttgatcatttaaaagaattgagagggtggaactcagctcgatgatttgtttttgctgcgattgtattattgtgtcgtattttttaaagctttggtccattttattgtttagattatgaaacatagtctcataatgcatcagtcttttccccaaagcagacaatcgctcctgccccaataaagaatcgttatcatcgggattgaataacaagtagttgtcaccatagctattttgatgatgattgtgggtatgatagtcatacggaacaggtacagaagaatctggaatactgtgaatattgttgtgaaaatgatcgacggttgccatttttaaggaatcttgattatgttttatattagtagtactcatttaagacacaaaaaaaatctataaaagccaaaaaaataaaagcatttagagtataaataaggccattgaatttatgaagactggataacaaaataataaagactcaatctaatcttgatgagatgttattatgtttgttcagatttttcttgttcttttgtttatttatttatttatttgttattgatgataactttggataaataaaagaagtagagatgaaagaaaggttgatggaaacaagttggagaaaagaagtaaattaaacagataaatagtcgtcagcttcagaaaagagagcgaagagaaggtgtatgtcacaatttctacgatgattcttgttattttatatcaggttctctatttgtatgacggagtataaattccttagaaaataaatataatatcgatgccaaaatgtgtatgtatcaaagtcagaggtgctcaagtaatcaatagcccataagagaatagtaaaataatctagcacacaataatttttttttctttctttcttttttctttacttcttacccctccaggaaagagaagaggagaaacgaatactttctttttgtttttttttttttttgctaatcaaacttttctaatctgtgatgttatttctaataataaacaaaatgggaaagtaaacaatacacaacaccctggccaagatttctaacaacaggaaaacaaaaaggaaaagatatacaatggatcttgcattaattggtgcaacacgttttttccaaatagtacacaaaaaacagatccatattgcataaataaacagaactgtaccaaaatcggacaaagtaaagaatcctaagaaacacgacgacagctggaaataagaccaaacaaaaaaaaccatctatctaagcaaaatctccgaaaaattgaaatataaacaatcggtcttttttttttctttctttgatggtatagtgacagaatagcataaagtaatctggcccttcccaatgcatgccataagcaaaagggggaaacatagcaaacaataaaaataaaaataaaaataaaataattggtcagatatttgccatttcaaacaggaactaaatcgtgtggttaaaacaacaacaatgacaacgacaaaccaaaaaattgttggcacatattacacatacttctctattgtagtttagtcctagtgcgcttagtcatgtcttgatcttgtttggttatttgtccctccccccacccccaccactatgtttctttgtctattgtagcatcttctaagattacaaaaaaagaaaaaaacatcagaatctggacaattgaaggagttgaaaaaaaaaaaaaataaaaataaaaataaacaaaaataatatcttttttgttttctattttgtttaccgaaattttggagcccaagccattttctttctggtattgttttcttggaaaattttttcttttttttcaaggagaaaagttagataaaaaacaaaagaaaacactgcaaaaaaacaatagagtaatatgcatataacaattttttttcggactaacagaaaaaagtggagttttctattgtcagatcttctaggacaatactacgatgatgtaagctttgcacaatttgtagatgagaacaaaaagaaaaagaaaaagaagaaaataatagccaattgggaaatgaattcaacatatgaagtgtcaaagcaatagttcttttttttttttcgtttcttctcttgttctttttctgttttcagcaaacccaccccttataccatattagatgatgaggtgggggaggaagaggaggaagatactgccgtagtcattgtagaaagtgattcagatatcaataacgctgcttgcaattggaattgtgccaagccctccacttttcgagtcttcccattagaatttacctgtaaattgtatgatatattatcttcttttccactatatctctttgtaaccacattattactaatatcattatcattggctggctcattaatagacttgaaaaatatttctatatctcggtttctttcacatgtttctacatcattgtcaacgaaaacatttctagtggatgataaatcatcgtcaaataatacatgatcttcaacgaaatcgatagaaaatgatattcttcttcttctccttccttctcctctctctggctcatcatacaatttaaatttcatcaatagtttaatgatatcatctttattcaattgatgatttatcggatcatacgttaataacttttgtaaatctataatgctaattctttcatacaaaggcactatcttgtacaacagttttaatttaataacgatattaaacatttcttcaagcagagcctcgtatttatttacagcttcgttgatattcaagtttcttaaaatttcttggatctcatagtacgtttcctctaaattagtcattttcactagctttgtatagaattgttgtaacattttgataatgtgtctatattgtaagtttttacgaataattttaatctgttcatattcaaatgggtccaaaaatctatcttctcgcgattgtgagttgttataatacttgtcctgtaatataataaatatactggtcaagataaacccacttaataagtattggcaatatccgttttcaatccattgactatatgatcctaatatctctaaatgttgcaaactagataaaaaatggtctctacatgaagaaacagtcttatatgggttcatatcgaccgatatgtctattaacaattggatagaacaactgaaatgatataagaacattaatcgagaatcctgtgagatagtcaacagaccacggctacactcttggaaaagttccaagatttgatccagtttcaatatcattactgtatcatgtctcataattcgattgttgttaaacagatataataagataaaaatctgaaatgtcacttcaaatcttttggtaagtatcctttgttcaaatgggcttttattagcaatgattgcagaacagtcgtccttattaaatatatttaataggttagtgattatcgtattgaatgaatcataatcaattgatagagaggaaggaagatcgttattatttctggggtccatagttgggatagagagtaatctcttccattgtgataaaatgatagattgaagttcaaggaagtcggcaatttgatggtcaatagttctcaaagttttaaagattatatagagatttaattgtatattgaccttatctaatatttgcctgttctcacaatcgtcaatttcatttatttcaaagatatagcgattactcaaatcagggaaaaaatcaacaactaaatattgcaattgggataaacatatatgactgttatcgttttcttgcaaaaggtaatcacaaaattgactacattggccaaacaaatcatttagattcaatagattattgcagttattataataaaggattctagtccagcaattcataattttcacccatattggaaagatatctgatggtggtaaaccagaggtgtttggatatattatattaagtatcctaagaaactgaagccttgcatcatcccatttaccgatattcattaatttttcgccttcagaaaccatttttgttatggctgcatcgttttcattaggagtgacactatcacgactacccccttcttgttgtttttcatgctcttctacatcactttcaaattccatttgcaaactttcatcatcagagatcataaaatcttcataattcccattctcttcatcagtatcgaacatatttctttctttttttcggccaaaaacggtgcagatgaaacagtaaaataaaacttctattaaaatataatagagtgtatggtgtataaataaaaatccttaagtctccaccgcttttttgattatttctccctatctctatcttccttgttcttgcttttgaaattgtgaattgtaatggttagtcaatccttaatgatgtgacacctccaaatttgtgtctatataaaggtttgatagctaggtaaacatttaacaaacaataaaatatatatataaatagaagaaggcacctcctgaaatagaaaaactaaaaagaaaaaaaatgaagaattgcttaaaaggaaagggtgaattgattttatattcagaattaccttctacccatttgtttatattcacataaccttagatcgtatgccgatgacgaacagtatgtattggtcactgattaccaagatctactctgttttactttatattcccttaaaaagtatactaacctcttctctttgtggtgttcggaagttgtgattttagttccacggaaaggacaaataaggacacaaaatcagcaacaagatccatagatcaatcatctgcaattaccaggagaaacaatgagaactgcggaaaacaaacgtcggaggtagaacccggagttgagatatatatatataacaattatcctcacaaacataaacacacacgcatatacaccaactctaattatggttggaaaataacttacaaaaactcctgtattataaaacaatgtaatctctctgccaagaaaagattcttcatatgtatatgtagcttgtgtatgttcatatcatgtgtatggtatacacaaatatggatagtgactgcaatagtaacaatgaatatatatatatatgtatatacttatatggttttaatcacagaagaactagccctactttgtgaagtcttaggactatacaaaacatccatacacccgtctcataatgtaaaaagaaaaaagaaaaaacaaatgccctctatcagccgattcagttgatcttgtcgcagtcaagacaaaggattgagtcatttgggaaatgatcttaggtctatctcgtttctttttttggttcacctgatctgatcttgctattttcaatagaaaagactgcgccttgtttccatacatgtaatgtaactttaaaaacataataaaacatgttatttttgctgatgagtatacctgtaagcaatcttgtactgtttattagtcacatattacgctacatatatatacacatacatgtgtgtgtatatactcgtgtgtatttcagagtcatgttgttgcgtttggatatacttagtagctaatttttgtatgttatagtcgtcttgtcaaaatagtacaaccggaagggtttggtttcctagtaaccaaatagagaaataataaaaggaaaagaagagataaaaggaggttctgcaatatgttattattctctactactggtaggttctctaagcagatattcaataaacacaaacgtcaagaggattcacaagatgtaatctctgacaaacaaaatggtgatacagaatcaaaagggactgattttaatcatcattatcatcctaattttcaaaatactagaacattccaagaaggcccaagttctgggtttgtcttgacacaggtaggtgatgatgcaactatattaaccaagagtagtgaatctactattgtccataaagaaactttaaaaatcattgatactcaccctgatttgttttctgatggtcataactatgataatgcctcacttttgtttgatgaagataaagaatttccagaaggcggcttgaaagcatattcagttgtgtttggctcctttatggggctgatccccgtctttggtctaattaattcaatcggtgccattgaatcctatatatccaaaaaccaattggcttcagtgggatcttctactgtctcatggatcttttctatctatctatctattgggtttttttcttgtatccttgctggtggttacttcgatagaaacggcagtaaacgcctgttgatgataggtactatattatatgtaggtgggatatttgcattggcggattgtaaagctctttggcaatttattctagctttctctgtactaactgggttgggcactggtattctaatgactcctttggtcagtgtcatagccacttggtttaatagaaaaagagcaatggctacaagtgtcgccacagctggtggttctgtgggtgggatctttatgcctcctatgttaagaaaactgtacactcaagttgggttccagtgggccattagaatcttggcattcatttgtttagcttgtttattgttctctgtggttctttgtagggagagacagaagccaattgttaactcgttggattctatctgggacacaattaaatggtattttaattcttccttcaatatcagatattttgctgaaccaaagttcttattcactgccttcggtatgtcattagtggaaatttctttgacaacaagtttgacttttatcgcctcgtattctctagagatgggcaactcggtaaccacatcgtataatatcattatggcgagtaatatagtagggatcctgggtaggtatattccgggttacgtggcagataaatggatgggacggttcaacatcatgattactacaaatttcgtgtgttttattttgaacctggtcatttggttaccctttggtaagcacgtgatagcgttgtggatctatatttgtctctatgggttttttagtggatctgttttgtcgatgacaccagtctgtattggacaaatttcaaggacagatgattttggtaaaaggtacgctactgcatattgtttgcaggcatttttaatcatccctgccattccaatcggtggtgctattattggaaatgggtctaaagttgggtatgacaactttattatatatgtgtctatgatcatgctagctggaacgttatgtttctctcttactaggtatttttgcgtgggaatgaaacttgctaagttttaaagccaaatatattcgtaagttaatacatttattaattacaagcgtatagattggatagcctcccctctactctgtattatccttttgcttcgttggttcaacgaaagttaaaaagaataaagaggctttttttgtctttattattttgggactttcaaatttattttattactaataatctgtataacgtagatataatggctaaataactataaaccaatagagaactaaaggaatatacttatatataaatgctatatgctgttgtaattttactcacttaaataatatctagtattatttattttactttcaactttagaccttacttttctaataccacaataattggaagattcttcacaacctcaagtaacaagataattgcacaggtataaggaatttcggcaacaaaaatattcttttagaaataggatgaaacaatattgaaaccacaagcaagacttattattttttatcatgatccacatatactttaagaataaaccacaatatatcattctgtttacaaacggtactattaccacagtaaggaaacagctcaatgcaacaattacaaaaaaattttctttattatctaaaaataaggacatccacagattactaattaaaattaccattggaacactgattggaatatataagtcttgactagaaaacattaatccacaaagacataaaaaccacaataattgcatagaacatattagtaaaaagaaagttggagtgtagtgaattagtagaaagtacgaaaagagttaaaaaaatataacaaactcaacaaagaacagttggaagcaaagagaattataatacatatttattttatttcttaaaagtaccaaaggtagtatggtatgaacgatgtgtaagataaggtcctaaaaatatccaaactatgttttcaaatacatctttttgaaagtcccaggaagagaaaatgcattactgcacgcttcatatttgtaacaaagaaaaagtgttatataaatgtagaaataaaaaagtataacattaataaagatgacgttaatagaatcgttgtttgctatagacatctattttacttgatcatgtatatgcaaatcaatatgaagcagtgtcgggctctcctagccagcgtaccggactaggcataccgactaaaaactctcccacaaaaaagaaaagaattcagaaataaaccacaaatcagacattaaaacaaaactctatcgcataatgaacgcacaccgaccacttatatcgcttggttagtatgaagtaatgagcgcttggaaagaaaaacggcagaacaaggagcactacagaaactaatgtgcttacggagggcatagggtcgactttcaaaacgaagaagtgtactaagtaaaacaggtatctgcatcaaggaaaacaaaaactggattctgtctctcctttatatatgtcagtgttttaaaacttaccccttaaactttaagggagaggtggtacagaaaacgccacacagaaatctcaggactgttttttctttttcaacggaaattcaacaagaaggacctaaatgtcattaaaattgtgtaatttcctatttaggtagtatatattttttatctttttttattttttttttgatttttcaacttttttccttcaacccacgcaatttttgatctttttcttttctgagttttgaaaattcaggaaaaaagaaaaacatactcgcagttgagtcgcaaaggactattattatacattaaactcttgagtgtgatttagggtatatttcaatggatttagttcgtactatttattgtcgattagttccttattctttgcttgttgggttgacaatacacaagaagccgtcaatctagaagtcgttaaaaatgggtatcgatcacaccaccaaacaacacaagagatctggtcacagaactgctccaaagtccgacaacatctacttaaagcaattagttaagttatactctttcttagctcgtatgtgaaattacattatatttttttactcaaagaatatttcataaatggaatatgtcaatagagaaaaaaagggattcttcaataaatgctatactaatattaatagttttttatttatgatagatgtctccttgtttatatgtttgtacatgtaattaagggacagttctgcgagtgcaatcaaatttttaaaggaaaaaaaagatgattttcttgattttggataacatagttatgtctggatgattaaaatcttcttttttgtttaggttgtgcggtataacaagaataataatatattgatatttttattagttagatgagcagaatcctttcgttgtttaccatatgatacattagtgtcggtaagcatcgagaaattgtttttcatccctgaatttttgtatactaacaataatatattataatgttttatgataatcatttacgtttattataattttggttttatgttttttcaataggtcgtactgatgccccattcaacaaggtcgtcttaagatctttattcttatccaagatcaacagaccaccagtttccgtttctagaatcgctagaggtttgaaacaagaaggtgctgctaacaagactgttgttgttgttggtactgtcactgacgacgccagaatctttgacttcccaaagaccactgttgctgctttgagattcactgctggtgctcgtgctagaattgttaaggctggtggtgaatgtatcactttagatcaattggctgttagagctccaaagggtcaaaacaccttgatcttgagaggtccaagaaactccagagaagctgttagacacttcggtatgggtccacacaagggtaaggccccaagaattttatctaccaacggtaagttcgaaagaagtagaggtagacgtagatctaagggtttcaaggtgtaagttaggtgaagaatttattaatttgttaattaatttttcttctttcgtattacctttgttactgttttaattatcatcgtataataacgtagttctttatttttattgtatatttagattgaaataaataatactacatcataattacatttatttagcatgagtttgttctcttttgtatagtagatataatatatatatatatataagttcttgtggggttttgatagtattttcagcatcttttgaaatgtctgataagattattagaatagtttttggacccctgtattgcttttatttttgttgttattagtgattatttgaggccaaaaatagccaaggtcatctttaagcaattggtggaaggtagtgttaattcagaggggaagagctgtttattacattgaattactaaaacagcgatcttgggtgtgacagaaaaaatagtagataactatgatacactacaactgaaatgctacataagactattttaatatatgtatataattatattcatagtaccgagattagacacatgataatgaagtattgtaactactgtattagtcccaacaagttacagttaagtattagcctttctctttggtttgaccataaattcagtgtaataagcctaattgaaggatttctaaaaagtgataattatatcagatcttgttcaagaagtcttttgatggttgtgggtaatatcaggtttaatcatattactattgcttgttgaaggtagtagctaatactatgcgagacgaataatagctgataacaattaataacaataataatacattaaattattattttattttatatagaatgtaatttataatgtttgtattttggataattgatattattcgtctgtatactttcgatataagagatgaaattaggccagagaactctgaattgtaatttattgttataaaacattaaatttatagaagtaattcataataatacatacaaacaaaaatgaacgtttaactctactagtttaaagtaataattataattactaagtaatactcaatctgtttcaactctacatttcccctctatgtcaaaatcatgtatatatgtcaagtcatattcttatcgcattctaaatcaaatgataagaaactacgcatagaaagttcgaaaataccaaatctttacaatctcactatttcacattaatactataatccaaaaaaattagagcacttggtacttgcctctgaagttctctacttctttaatatgatagtcttttgacaaaaaacaatgttaaagatctacgaagtatccctaaactgtgtacatccacaaattacactttatctgcggctgctgaaggctatttaaagatgcaaatatgactcctatttaagattgaggtttataaatggatgcaatatccttcattactaaaagtgttatagtttttacttaaaatacaaggatacaatggctatttcccatctctttgttagtttacatatcttcattttaccttatacattctttcggctttaactctgttttacttgaaagcagcagaaaaatgcagcggaattttacaaaatcccacatatttcccgagagtcttaacaaggttgacataattttgatgtttataagtcattgaagaatttttataaaaaacatatagacaaattgcattcagaactctcatactttcttgtgtatttagctagctttgaatcataagctggctctgcaatataatattttccaagagacaaagcaacccagttttgttccttcattgttttgctttttttgttattacctgaagcatgactattaatccgtctcgtagtaaggaaccaaattatattatacagcaaggttcaaccagtattgaaccttttgatattggagatagttccactgacaaggtaaacattaaaatcactgatgatgtgcctattactacctgtaattctgtatcatcccttccttctacagaaaagtcagtgtccttgaacgagacaaataatacagtatggtccaatgctaaggccattttattcaaatacttaaaatttgtgggtcctggtatcatggtttctgttgcatatattgatcccggtaattattctacggcagtaagttcaggtgctgctcatgaattctctttgctttgtatcgtccttttatccaattttatcgccatattcttacaatgtctctgtattaaattaggctctatcaccggaaaagacttatctagatgttgtagagcttatttacctaaatggatgaattggataatatatttttttgctgaagctgccatcatatctacggatatagcagaagttattggtactgccattgctctaaatattcttattaaagtcccacttcctgcaggtgttgctatcacctgtgttgatgtattaactgtaatgatcggttacagacccggatcttcgtctatgagaatggttaagatgtttgagtatgctgtggctgtcctggtttttggtgtatttatatgttttgccattgaattagcatatattccaaaaaacacatctgtagctcatgtatttagagggtttataccgtcaaaacaaatgtttcaaaataatgggatgtatgatgccatttctatccttggtgctaccgtgatgccacattctctatttttgggctcagctctagttcaaccaagattattagaatatgacatcaatcataaaaactattcagtgttaagagatgatgaaacagatattaaaaataaggaaatcgtcatggaggaaagatatttcaattatagaccaactatggattcaattaaatattgtatgaagtattctatggttgaattaactttaacattattcactgtagcactttttgtcaattgtgcaatcttagtcatatctggagccactctattcaatacaccaaatgccagtgatgctgatttatatggcattcacgatttgttatcacgtaatttggcaccaacagcaggcacaattttcatgctagctttattgttaagtggccaatctgcaggaattgtttgtaccatggcggggcaaatcgtctgtgagggacatgttaattggaaattattaccatggcaacggagattggtatctagatgcatttctgtaataccttgcctagtaatctctatatgtttgggcaaaactgcgctaaataaagcattaaatgcttcccaggtggtactgtcaatagtgttaccatttttagtggctccattgatatattttacatgttctaaaaggataatgacaacggagatcacacggatagataaaaaagttgaaacagatgtaagtaatagtattagtaatgaagataatactgatttaaagcaagacttagagtctatcgaaccaaactctgaggattctgatgaaaccaggaacgttgaaacggtcagtatggctaataattggataactgcaattatagcgattatcgtttggttatttttatcattattaaattgttatgctatcgtagagttaggtatcacacacggaagtgatgtgtgatttgtacaaattcttcaccaccactctgctaatgtttcaaatatatataggttaatccacatatataagcacattaattcatattattgtttttcattgattttaattcttaattagaattattcatatatatcttatatacatacatttatatacttataaaagaaaaataaaatatagtaaaaagtataaaaaaacattaaagtatccattagaaaacttgtctacctataagaggcatcccttataccattctataaataaaaaagtttttcaatggccactgagggtgtagaaaataaaaaaaattattaaattaatttaaaagaatgcattaaaagtaaatgtttatttgtatccgtatttataaaccgtacttattatatggtatcagttgatctttcatctgttgtatggatgatatccgttattattacgtctgttatatccactacgaccaccacggtaattgttgccagagccaccacggtaaccgccacgatctatacgacgtcccctacggtccccacggtctccgcgttcacgatgtggatagccaccatgagatggaatagaggaaggatcctttggacctcttggaatatttacatctggtgtattggatctagaatcattggaactcttattatccctatccatattattgctactactactgctactgttgttatttacatttccgttatcatcatttgtggcattattattctttgtatcactgttctcgccgattgtctgaacgtcaacagaattagatccgttgttgtctacagtcatggatgaactttgtggtgattgtgatcctgtttgtggttgttgaggtggcattacgaagcctggcatcatcattgccatctgttgcatttgttgttggtacatttgtgtataatcaatacctgtttgttgttgcatctgttgataatactcttgcatcttttgatagtagtcttgcatagcttgtggattaaagccggccatcattggattgaaaccagccaccattgggttttggtacatcgcagcggcagcagcagcagtattcatcgctacactattggcacctgtgcccatattcatagaatgtgaattgtagttgttagaattacgattgttaggattagcaccaccgtattgacccttctgtagatgtcttggttcggcccttttaatctcaatttgtttacctttaaattcaatgtatttattttcacagactctatctacagcttctggagaatcatatgtgacaaacccaaaacctcttgatctacctgtatctttatctaacatcaattgtgcatcaataatagtaccatattttgcgaaaaattcttcaaactcctttggtcttacatcagcaccaataccaccaacaaagattttaccagtcttatcttgttcttctcttggaattgacctctttggatcaataactttaccatctaaaatatgttgtgttttaacgacttcatcaacggaggatggagattcgaaagttaagaacccaaaacctctcgatctacccgtgtttggatccttcatgatctttaaatctataacatgaccatacttattgaagtaatttcttaaaccttcttctgtggtctcccaattcaacccaccaatgaacattttacaattatctttagagatatcagcctttacacgcttttgtgcttcattgttgttttctactgtttgttgttgcggttgttgagggttgaattgggacatagtttgttgtagttgttcccaaggcaaagctgttttattttcagaatttacagtagaatcattggaattacttgacatgtccttatttgcattgtcagaattattattaatttgattcaagttagaagataaagcttgcaatgcagctaattgatctaatgaagatacgttgttatcgttgttattactgttactaacctcttcagtggcattattattgttattatcgttttctgaagaagcatcaatggaagcagctaaattatcttgatcattttctttaactagttcagtagcagcttctacagccttattctcttcaacagtggcagatggttcatcatcgccataaatgtcattaaaatcttcttcatcagaactcatttttatagtcatataagagcgtccgtttgcttgtttgtgattgttttgcttcttccttattataaatttatatttaataaataaatatgcgaatgaatatgtatctgtataatgtaaaataaactaaactaaaataaacacagtgataaatgctagagaattcgttttttttcttctaaaatactagaagtaatacagataaataataactcgttaactttgaaatacaacgagaaatgaaaaaaaaatgagttattagtaatatatgaaaaggtcaaatatatatataaataacgacaatagctaataagtaatctatgcgtgttttttttttctcttatctaatcttgattacgagcaccgaaaagatttctaaaaataaaataacagtaaataacaaatgcgtatttatatatttatagatgatcttataatttataattataaatatgacaaaatagggtagtcaaatgaaagaaaaaagaattaacactaaaatcttaaaaaaaaaaagacaacaatcgaataaatatatacaactgtccaatgtattgagtgtcttctcttatcaattgagtgaaatatgcgaagagacagtagttagtaaaaaatatatttatttgtctagaatctagcttgctatatctttgtctgtttttcaagtgaacacctagggtaagagcggagcacgaattagacgcctctttccgtccctgcacaaaaacctgttgccttttatactttttcccaaaaagactacagcgacaacctcgttctctcagttttttttttctttccacgaattgccgctattaaccgtcaaagggccagagacaactgaaaaaaaaaagaaaagaaaaaaaaatcaaaaacaaaaacaaaaagaaaagaaaaaaaaaagcaactaacaagggaaaccgtaaaataagataataaacacgtggtagcgccaagaaaaatccaaactcggacataatgacaagatgaattctattcatatcttataatctatctgagttatttagtataattagttttgctatgactcaccagttatcaaaagattagtgctacaaaagattatcacaattgatagcatcgagatatgctatctatcatagtacagaaaataacaaaggcttgtctatctgcacattcggaatgaataatatatttcctattacattgtaccagaagtttcataacatgcttaacacggactatatcaactgccataaactccctattggtttcattaggttattcttttttgcttttttattttatttttttttttactttccatacatatatatacaatctgtttaagtttcatgaacatttatcgattgcttctagcttcacctctcccttcgtcttttattcctcatactcccacgtgttaatatggctgttagtattgtttttctttccctcaatagatttgaaaatgtaacaatgaaaaaaaaaaacattaaaaaaaaaaatctgcgaaatgtcctcgaaagaatctactggaaaacccaaaaaaaaaaaaacaccttatttcaatgtcatcgataaaaatacgtgctctataaacaatgaaccgatcaacataggtacatatttatgtatatatggtgatcccgaacatcaacaataacacaaaacagatcaacatattaaccagatttttccagaaggataaagatgactaaatatttactttatatggtccagatgcatttaaatttccgtcgtgcggaactggaatcattggcagacttattcaacattaagatcaacttagactcttataatgagcattccccatttcttatcgttgatttagacaatgaagaacaagctaaacaactgatacaaagaagcatcctttgtaaagctatctatgaatattgggggtatggtcaaaattatccaactttacatcaaaatatacaaaacgaaccgaattttgtacaaagaagggattcgaacaagtttaagtcattcaaatttgattttgaaagttttggtggaaaccataaaaaatccttgcctgaaaagatcgacacaatcaatcaattcaaatatttagattttcaaggtgagataaaactaaaagatccgcaagagatctttactattattgaaacctacagcatgattgatcctcagacttcaagtaaccaaacagatggaatttattttggtcggttgatacaaagaagtgaccgttccagcatggatctttacgatttaaagaaaagaccatacaagggaacgaccagttttgaaagtgaattgtcactgataagttgtaacatagcacaagtcaaaccgggaactatcatgtacgacccatttgcaggcacaggctcatttttagtggctggtgcgcattttgatgcctttgtgctggggacagatatagacggtagaatgatcaggggcacaggtaaaggtagtgaacataatatggtcgataacttcagatattataagactgagtctcatttcttagatgtgatgactatggatttcacacataactcactaagatcgaatcttccaattgatacgattctgtgcgacccgccatatgggatccgtgaaagtattaaagttttaggtgctaaggatccagaaaggttcgaggggaaagaaaatgtggttattgatggtgaaaaggcatatttaagaaaggattatatacctactaagaaaccatattctttggattctcttttagatgatttattgaaatttgccagtgaaagattgccaattggtggacgtttggccttttggatgccaacagccaacgatgagaatgtggaaacaatcataccattacacaaaaatctggaattgaaatataactgtgtccaagaattcaacaaatggtcacgcagattattagtttatatcaatcgaggcgacaaatataatgggccagaaaatcatgggataaagaggtctcaaactaacttcagagatcgttatttcacacatttcactaaatgattattggaagaacaaaaaaaaaataagatcactaattctacaaccctacaaccctataaccctacaaacttacacacacacacacacacacacacacatacatacatatacatacatatatatgttattattttgataaaagtaatgcaacattttctaaagagatatccttagatacgtattttattaaatctgtctttgaatgtgggaacttttgtttaacccattgtaacctaccttcatcaataactcttcttgccatcaagccgattgtctctctttctttaacagtaacaaacctattttctgtcagttccaccaaatcacaatcttgaacaccgggtcgttttccatttgttgcccaggaacataatttagtcaaggtcagaaagaattcatgataggtcaaagtacttccgaattttttcaaaagatcggtgcagaagcgtggattaatgtattggtctggatcacatatatgtctgcaacacatagcaatacagatggaatccagtgagtcgagtaacagtgggttattagcgatacaacgcaaagtcagatctgttgcgacaccacatagatgtttagaaatgaggatgtttttatttgaagaaaaggggtcccttgataatatgtcgtcgacatacaggtctttaatatcgattttcaatcttttgataaaaggcgggtttgaaccattggaatctgataggattttactatcaaatttcaacctatttgaccctctatcgataaagaggaaattatttattcggaaacgtgggaaatatggagacaatctggagacatctgcggaggcatctctgatcacctgattgaaataccttgaaaactctgctttaccacatccaaactccaatacattcaagtttctctctagtgtagttgtgctgatatctgtttcaagtttatctttgtacctgtattccaggagattctgtatcaaagaactttgttggatagcatgtttctgattagaaagagtgtttacccttgtctcggtcataaacttattgaacttcacagtggtggataactcattgatttcacccgatttgaagaactggtacaacaagtccacagttttattcaaagtatctggagaaagagatggtttaggcaacgatggggtggattgtgcggtgttgagatccagtttataaaacgtgtttgaatcgtttgagtgtttcagtttaaacttattgcatttggtgagatgttttttcaattgagacttctttattgtgtgtttctgatccagtggacagggtattctttgtaaatcggtggcatgatcattagggctgttatggaccaatttgttggccagtcttttattgagtatcgaatgctcggaacagtagtcttcatcagcccgtctagtcatgccacattgcctattcttcttttggatgaaaaacttacattgaagacgggcagtcttgttattcttcgtattttcaatatgtttatcagtcatagaaatttaaactgaagacgataatagctaccagttttgacaatctgttactaatttttttactgttttattatttgttaacccatagagtgatactagtgataatttcatacatgcacagtaattcgtagtagttggtaatggtactctttaactgatagttacaatagtcaatcattgcaatgcagggtttcttttttcaatctcatcgattttgacaaaacaaaaacccacacatccacacatgtaaaaccaaaaaaaaaaaagataacagcaacagtatctgttaccctctccccctctatcttctttctctttttcttcctttctcggggcgggccgaaccgagcagaaaacaaaacctaaccaaaaacaaaaaaacaaaccctaaccctggagagttccctttggttgtggtaacgacagcagtgatgaggtggttttattcggaggatcccgagatttcttcttctttcttcttgtgtttttcccttttttttttttttattttttttgtttttcttctccgttgaaccggcaggggagggggagggaagattggataaataggggcgagtcgttgatttgcttccaattctcttattctgtttttgcgcataatggcaattccgccccccccaaacacacacccgcaaaatacaataggcataagcatcaagaaagaagaaaaagagaaagaaaaagaaacgatgacacatcgagcggctcgccgtttgtctgcgcactactgtgagttaaaacaaacatacaaacaataagagaacagtattactactattagtatcaacagaataatacacactgaaataatagaacaaatggggaatggctcattttccgtttcttcattgaacaagcaccaaacctttctcttttaacattcttctgcttttttttctcacatattcgaatggatcgagaaacaagtgatataatagtagtattttttgatatatataaagccatttattaaaagaaatgataaactttctgggtcattcctgttgtcccttccacacctccaatccttctctttctctttctcttcctcttcctgtatccttgttagaaagaaatagtgtgaaccaaaatagagaaatcgaaacaaaaactggaacagaccctagtgatagattactctccgattcatataaaagtatacatatcccactatatatatatatacttactctactgaaagaaaagaaaagaaaagaaaagaaaagaaaagaaaaaaataagaatatgccacaccaaattactgacaactccaacccttctgaacaaatcaaaatttgtgtcttaggtgccgcaggtggtattggtcaatccctttctttactgttgaagacccagatccactatttgttgccatcccatacaaacaagagtataaacttgtctctatacgacatcaacgaagaagttatcaacggtgtggccactgatctctctcacatcgataccccaataaacatgtcctggtatgcaggacactccatcgacaggtgtctacaagacgctaacattgtagtgatccccgctgggatgccaagaaaaccgggcatgacaagagacgacttgttcaacatcaatgcaggcatcatcaagggtctaaccgactccatctaccaacactgcgacctctccaaagtcttcgtacttgtcatttcaaatccagtcaactcgttggtcccagtcatgcattacagattcaaacaactgctaaatggcaaaacagacacaggtatcgaaagaagaatctttggaatcactaaattggatatcgttcgtgcctctacgttcttaaagagcgaatacgagacagccactggtcaaatcagttcaaacatgccattcgtccccgtcatcggtgggcattccggtgaaactatccttcctctgttctcccaaaacaactggtcgcatgtcctaccaaatgaagtcctacagcacttgatctatagagtccagtatggtggtgacgaggttgtcaaggctaagaacggcaagggatcagccacattgtccatggctcatgctgcatttaaatgtgttcaagactttgttaatttaatactcggcaacgctcatgaaatcgattcaatcaattttgccacgttacgcgatttccaagagagaccaatcactcagggagcagagaaattgctgaaccgcattgaaaatactgccttctttgccatcccaatgtctatcaacttgcaaggtactaattctgtaaactacaacttattaaacaatttaaacgctcatgaaactaatgaattattaccattatgtctaactaaattaaagaagaacatcgaaagtggtaaagtcttcattgaatcttctgcataacctataatctaacattgtggctctatatcctttgattctctttctttctttctttctttctttctgttttctccaactgaaaaacaaacaaacaacaacaatattatatattctttcaatatgtcttataagatcattgtataaataattatttttgaattcaaataatacacttatacacctatacatacacatagatatattatatatagaagcttttatatatagctataatcatatattccattgaaaatattacaatcttattatattatcttacttttacatataacacttttgttcgcagaaaaaaatgacttcgtgcaaaacgatactctttctgccgtgcaagatgatttttaaaaacatactcttttttgttttttgtttttttgttttttattttttattttttttgggaccataaggatttggttgtacttcaagacaatctgaatctgttaatgttgaaacaagtgtctgtttttttttctttctttctttcttttaagaacatagttgctgttcttaacgtctcaacctcaattaaactcccatttccaatctataactgcccttttccatttttcacaattagatctcttttccacacagtgtgttccctttctcaacctcctttctctctgtctcccctgtttatttaaagactatccgaaaacagatagaataaagggtccataaactcaacctgcaatatctatctaataataatataaatataaatatacataaacatatttattattattattattattattattattattattattattattattattattattggtattagaatatatcaattattaactatatcccacctttaagtctcctcctatcttatttgaacaaagtttgtttgtctatttatttatttatttatttattttcttccctcttcttttatcttatttgattataattatttgaaatggacaatactaccagtactgttactaaagattattccgatttagaagtcccactgaatactagtttcaatattaataacaaccaccaccatacttataacaatagctccttgccaaatgatactttcgaatttattgcagatgatgtcacttcaaacagatcaaacacagttagaagaatgcttatcaaggagtatagaaaaatcggccgtggtgcattcggcactgtagtacaagcttatatgactccaaataaggaaaattggtatggcccgttcgccattaagaaagttcctgcacaaacagaatataaatctagagaattagacattctaagagtcacaaaccatcctaatgtggtcagattggaatacttcttcacacacgtttctcatatagataacaaattgtaccaatatttagccatggagtgtttgccaacaacattacaaatcgaaattagtcgatacgcacagaataatatggagttgcctctgaaacatgtcaaattgtatacatatcagattgccagagctatgctctatttacattccttcggcgtatgtcatagagatattaaaccatccaatatactggtcgatccaaagactggtgtcttgaaactttgtgattttgggtctgcaaagaaattggaaccaactcaaccttcaatcagttacatctgttcaagattctatagagcccctgaattgatccttggttgcacaagttatactactcaagtcgacatatgggggctcgggtgtgtcatgggggaaatgttgttggggcaagccgtgtttcaaggtaaagaacctctattacaattacgtgaaatcgccaaattgttaggacctcccgacaaaaaattcattttcttttcaaacccaagctatgacggtccgttgtattcgaagcctctatttacgggcacttcaagagaaagattcgaaaagtattttggtcattcaggtcctgaaggtatagatctattgacaaaagttcttgtatatgacccacaatcaagattatcaccaagaagaatcatggcacatccatttttcaatgaattaaggttggaagattatttcttcccaagagatcattccgaacctgttaaactaccagatttattcaattttagtgatttcgaattgcatatcttaggtgaatttgctgatttaataaaaccaaaggtgaaaaaagaaaattcagaataaccagtataacaataacaacaataacaacaataataataatgacaataacaacaaaggattaatatatagataatataatgtatcttttttgtcttttttatcttttttgttttatcttaattcttaataaatgtttctcaattcaaatatttcattaaatatccatacttccttccatcaacctttaatgttatgatcttattgatgttttgctatgttctttaaccctttgttccttttttttgcttcttatgtcgtttgtttttatttaatatttataattaattactaattatatcattaagaattataacaatgtttattgtatctttctactactacttaaaatatagatttatgcattatcattgtctaataataataacaaatattattattattcaattgaatttatataaattatcagaatttaacattaacaatcttttttacccatatagaaatgtatatacccacccaaccactctcatcaaatagttaaagaatatgaatattcatcttccacattctgtgcaatccatagaataatgcaacttatcaagataaataaattacctaaaacattattaatccccatccccactgttggatatgtagtataatccttaagcaaaaatttaataattaaaaccactacagagccagaaagcccaccagctaacagagcaaaaccacagaataagatagtacgtgcctgccatgcagtagcttgctctatgtcagcaccacctataaatccactaccaccatccaaatttagtaacctcgacttctcaatagaactgactataatcatccctaatgtagaacataggaaaggtatccaatcaataaatgtaacgtgaacatctgaggcattggcatgttttgaataaagggcacagtctaaaaagacccaaaatccaagggcaaagaacaaacctgataggtaaacaccaattgtacgaataccatggaaacttgggactttaaatgggatacggaacaatctactagaactttgatgcgaatccattatttataaagcaatcttgtataactatatgtttgtttactccgaattatatttcagtttagcaatctagtaaaataggaactaaaatttttgctatcaaaattttaaactattatcgtttcttgtttgatttccactatagtaatacaaacacgcaccacttcttaagtaattactttcaaccaagaactctatgaatgcttaatatcctacagtttctttttacgacttgagtcgtttgtatatgtcttaagagagggagggggtcaaatttgttggtttgaaattttctattaaattaatttaaataaactaatcttgcaactttttcgtgaggatcaatgaagtcaccaaaacaataactgatagagagaacaaatgaatgtgtaacccagcttatatattgcaacatatgtaagatattgttgtgaataattatatcctttgatgtttcgtaaatatacttatatatatatacatagggggaaaagaatcatacatgcatgactacttgactaaattatagaaagaaaacaaaagcagaaaatgaactaagtgtgaatttatcacacgttggtttaattacaaagaaaaaataaacattaataataacagtaatgaaagaacagtttttaagactataaaattcaaatctatcacgcgggatgatgaattttttgtctttttagaagtgctactcttgtcattacttttatcattagactctttagtttgtgtggaaaatatatctttaacaatttttaagtcagagggttgttccttccatgcagtaccatccatgtcatatataattgaggatttttcctcctttaacgtatcttttggatttatttgcacatactttcctactgcaacattaacgccattttcaattaatttttcagataatgtctcattaacatctatattaatatttaaatttggataatgtctttgacaagttttatctaattttggatcattgttcaacttatctgtggtgaactcaggtataattgttgagttataacttttctttaactcatggaaatcagataataatcttataccattattttcttctaatatttccacaagcccataattatttgtctcttgcgaatattcatatgccaaaccaccggagaacacatctagcatttctttactgaaaataccttcaatctcgttgaattttcttggtaacactttattacaaccaaattcagataatatcaccggtatttgataatctttgtatgcgttaatcaataaatcataccctgaactctgtagggtttgtaatccacaccattgataggaattaacaccataaaaatcaactgtttgttcaggtttacttgaattaaaacaagataaataatcagataatgatattctatatttcaaatcatctgctgccgaataaccaataggtacttgtctggcacaatgtaatgccataaactgcttgacatctccaatggtttgtcttaagaatttaggagacacttgtgatgatttaaagtcgttgattacttcgttaccaataaaaaatgataaagtattcgaataattggaaaattgtttaactactttgaaaacatgttctaaataatccaagttataacttttccatggttcatagcggttaaggtgttggttcggtaatggtgaattgacatcaagaatcagatagattcctgccatagccagcagactcatacaataattatggtccaaatctggattcactgaatagaccctaagtgtattaattcccaatttttgaaataaaggtatgtctctggaacaaactgcaggatcagataatggatcaaattcctggttaacatcagatgcaccaccaggttgatatgccaatcctttgattaagaaccgggttttactttgagaatcaacaaaatgttttcctctaatttctattggattcaaaggggaaagttcagctaaaatctttgcaaaaatattaaagaataagactatagttgaaatggaaaatgttttcataacttgttagtgtattttattccttcttatagattaatatatctgtatgaatgtatatactgacacttgttgaaattaaagtgtcacaaatttcactttattttattttgagtttttttttatttagctacagaaattataaagagacaaaaaataattgtgacacattcataaaacatgtaaaagatttagggatatacagacagacgtacacaacaaaacacatacatacacacacgcatactttataaggcaaaatagttatcatcatcaaatgtaggatatataaacccttgttctgttagcgtagtacaacactctcttaccacactttcatctagattcaaactttgaaccatcagttggattggaacagcaaattgattagcatctttacctgcacattccttcctacagaaatctaaaatagccttagctgcattagcagtactactattattattattgccgttgatgttatttatgttatgagatgagtctgcatctttaacaaacaaagattgaccattattatttggatcttgattacttggattaggcaatttgccaatggcgatagcatgccatttgattgcttccagatggtgtgtcaatacttcattgaaagaatttatgttagtgatcacactgtattgaatatttttcttcccaccaaaatcttttaaagcaccatgtacctttacatatgtaccaattttgtactgctgagcaatctgcgaactaccttggttgttgccattattgctgttagtatccagactgtctgaagctgcattgatatcatttacattatcactccattttctaacttccagctgaccagtaccgtcctctacggtgactacaatgttagatgtatggtccgtgatatttctaatgacaccaacaaaggagacatataccagttcttggccatgcgaaacaaagggaccgtcttgaatctcttgagtggactccaaaatttgcttaatggtcacaggaatacaagtggacatctttgtagtagaggaatcagaactattggttcttgattcatgattggtttcaaacccacctccatgggcgacggaatattctgtgtatggttgataagttgacataatggatattatcttttctttttccctattaaattattattacttcgacttcttcttcttcttcacgcttctttttccgttgaatctacttagatagctatcttagagcataaatcacagctttctagcttatacgtagaaacaccttcccctcttctaaatgttcatgcagaattctgtagacaaccattgtggtattggataaaatctgcaatctcaagcagttggctctgcattacaaactgcgacgcgtcgatttcttactcttttccatcacgtgtctcccgagattttccacccaaagaaaaaaaaaattttttttcatttacaatttcaattttcaattggagatgaaatgagatgaggtaagatgagatgacatacagtatggtgaagaattagagacgatagtaaattggtgatggtattttgttggtttttggaagtatgtctgtagttttgtcttcttaaccaatagcgttacaaccagtttccatggaatttcttaagtaattaaaaaaaggagatcaaacaacaacaacaacagcgaccctgcattaatagttcccttgtccaaaaccattgactataacaacaaatctgatggatattctattgcattgccatcttttattggcttctaaccccaacattctaaatgatattagtaacactggagaaatccctcaaaatgctgagttgagttcatatatattgaacggtgaatcatacaaagtgataaaccatattgttgataccaaaatcaattcccctgacaccaaaatagatttaagttcatgtggcgatgatataaaacaaatctcagatactatacgtaaccatttaatagatattttcccctccaatgaccgcagtcttgatttacctttactctttgccatcgctttgttacaaacttttatacagaacaattatacagggccatctgctcctttagatgattcctttatatccaaattgtttgttaccaatgaacaattcgatgccaaaactgttaatacccaactggttcattgtttaactatacttggtcaacctgcatatggactagtagataacccagggtttttggttttatccttactattattggaacatatcacaaaggagccaactttatttggtaacaatgtcgatactgagatcactttacctaatgtatcctcaacagagaccccaagtctgttagctattgcacattggtggagagctagagccttgctgactcacctttctatcattcctgaaccgtcaggtaaccacccagctgttgcctctaaaatcctaagttcaatcgatttagttcatgcaatcaccaaaagtttacctcagaatgtaagtgaatccttcaaaagacaactttatacaatattctatctggaaaacattaaatgctctttgaccatcaacaccgaacatctctgtctgccaactttaaccaaagtacaaaagttaactaatttccaatttgttttaactggtgctcgtgcaaaaagaactaaattccagcaggtgactcatgctggtttaattatcttagctaaatctagcgaagactcctattttgacacaaatgatcagtcaactataacaccagaaagttttgaactaaattctgatctattgctggagaaaccacattttgattcgatcggttcggaaccattagacgaacaaatcattaaaagacaaaaattggatgaaaactctggtattgaaaatgataaattattacctatcgcgttacgtcaagaatatatacccactcaactacaagagttggatccaaataatcaaccacatttgtccaattacgatacactacaattattgttgagattatacacgataaaaaagactacgcctgctagagatgctttagtagaagaagagttggcctcattattaacaagaattatttatcaagaaggtgcaaataattggaccatcttttctcgtgctctttgggagaggtccatcttggaaacaaataaagctaaaacagtggaaaggggtcttctgcaaatgcaatctttggtggaagaattgggtcttaaaatccaaacaaggctaatccctgaggccaaagataaagagagtaattctccattaccaagattgaaatatattcatcaattaccatttattccacgttgggaattagatgcgtcgttagctgaaaaatatatgtctatgggtatattgaagtctgcagtggaaatttatgaaagattgcacatgtattgtgagactgcattatgttatgctgccgtgggacaagaagctgaggctgaaaggatattatctgatagaataaagagtaatactcgagatgccagagctttatctatccttggtgatttaagacaagattcaacgctttgggaaaagagttgggacattggtagatatgtcaatgctaaaaattctttagccaaatattattacaatccaccaaaagattctggtttgacgagagattatgacattgtgctgaagcatttaaatgattctttaagacaatattctttaaatttcaacacatggtatttctatggttgtgtggccttggaatgtgaaaggatggaagtggcagccgaagcattttcacgatgtgttgcactagatgatagccacgcaatgtcatggtcgaatttaagtgctgcatatgtgcatcaaggtaaattaaaagaggccttcagctgtttgaagagggcatcagcctccgactctcagaaaaactggagaatctgggaaaattatatgattgtaacagcaaaactacatgaatggaatgatgtattattagcatgtaaacagttagttcaaattaaaagagataaaagcggtgaggggtcaattgatcttccagttgtagaaaaacttgttgaaattttagtctctagcaattatgatcctgaagaatccaatttaagttatttccaaagatcctgtatcgaatttgtatgtattacaatcccgtctgttgtgacaacaagtggtagagcatggagactggttgctagggtagagctttggagaaagagaccctgggcctcattggattgtcaggaaaaggcgtatagagctgtttcacataacccagaccttgaaattaacgaaaaaatatggaatgaaactgtagttgcttgtgaagatttagttgctgcatatgaatcactgggtgagatggaaggtaaatatggaccaggaagccttgtttgtaaggactggaagtacaaagctagatcaacgattaagagtttgatgagtaaaggtaaaaatacctgggaaggttctgatggatgggaaagattacttgaaatcagaaaacaaatataatcaaagtaatacatacatagatatacacacatatacatatatcttcaagatggtaattctaagtgattttgaaataaaatgtgtagaaaataattatcttaatttgtttcagaatgttaataatgtacataactcatttatatatatatatatcaaattatccatgccaataatgcggaagagaaagaaaaaaataagagaaagaaaagaagaaatttgcaaagtttttttttaaactgatttttgaaggttcaagataaatagatagatctatttaccacattttgccaattgccaacgttggttatctaatggacaagcttctcttgtctttatccatttacttatacaatgtaaatgaaaggcatgcccacacgtcccccatgcagccacacactctgtgtcagtgtctgatatagccatcggttgacattcaatacatggctccataatatgatttctacaaatagcacaattgtcaactgcaatatcccaggaccagaatgctacagcagtccattttttgatctcaaatttttttttcttttcttgcttagattgagtctcagttgactgctgtggaacattctccacgtcaatatccatcttatctccatcactcatatttaataacttatttacagtaggttttttatgtgtatcctttatgtatcttccactttcttatctgatccaaccccagaaataaaaaaaatagtataaaagaaaaagcaaaaaaaaataattaaaagtgataccaaatcgatagtagtggttctgtgtacaaagtaacctttcaacagaatatcttaaaccatttccacttcaacaattccagctacctaacacaacatgagtcaaccgttcattacctgttgttacatgtatatatggtatgtgtccactattgaattaaacccatcaaagcaaattcttttaacacaatctttatggggaaaaaatctgaacgccaataaaaaaaaaaaaaaagaaaagaaaaaaaaagatgtcattactgaaattcgtgataaacgatatataaagaaaaaatattgtatcgtttcacacgaaacagtatcattgcggacgtaaaacggatatattaaaatttcggggatttaaaccaagaagttgagaataaaataaaaaataaaaacaaaaaaatttgttagttcactgtaaaaatgtttatagaagaattaaaagagaaacatttaattatcaaagcattagctggggtagtgcttattctgcaggaagagaaagaaaagacattgagtaaaaaaccaacaagtgttatgattcctgtcgatatatacaattgtatggtataatattaattttggcttttctatttcactttactctatttctcatttaatacaattaagaaaacaccattaactgcaagaacaggcctaaagatggcatcgaacgattctaataaaataagttccttatacccttctcctccaccttatataaagtttttcaccgatgaaaatgttaaaagattaccagagtacatgaaacagagacccacacctgttgaaaccaccgaagatgagcctccgattactaatgaattggagtttttaatccccccaaagatgcccaaatcccaacattatagagcctttggcagtgtttggcagattaaagatcaattactcgatttggagaccatggggattacccaattgtatataggtgccaaagatggagaagtcactaattatcaatataagatacaagaattaagacgattgctaaagtctttattattaaattatttagaacttattggaatcctaagtataaatccacccttgtacgaaccaaaagtagaacatattaggaccattctaattaatatacaccatttattaaatgaatacaggccccatcaatcgagagaatcgttaattatgctcttagaggagcagctggaatataaaaaggaagaaatcaaaaacatcgaagctacatgtgaacaagtgaaacaaaaattgaaacaaattcaagaatccttaaccttaacataatctataaccaaaaacatttttttttgtaaagaaataataagaaagagagaattttctggggtaatgttataagagattaaattgaagagtgtcattttcttcttcctcttctcccttttgttctattgaaaataattgcctctctttagttaatgattgaatcaactggttagatcacattcaaggaccgataatcattcaatttaaaaaccagtgcttcactaattctattattcacaaatcacagtggataatttgctatagaaatatacaaacttaatatgcgacaaagttacttatgacaccaatatgtctgttcttttttaaaaatgcgcaaagaattcaagaatataaaaagtaaagaatataagttgatctgtattctaagaacaaaaatcgaattcctaaatattatatattaatattgcatacataaaatgagagaaatccacgtaagagaaaataaatataataattttgctagcatttattcatagttgtatgattttcctcttctatatatatatatatacatgcatatttaacctaacccaggcaatacaccggcacccgaagatagactcaaacctggtaaaccattgacagtcttttcttcattagatgaccgcacttcattatgtaatgtagatgaactgacactatcttgtgtaccactatttgatgcaggtggagctgccctaaactctgatttttctcttactgcgttaatattattattgataccaaaataccaaccattaatcttatgattattataagttgggtcgtcataggcattagggtctactggccttgctcttgtccaaaacctaatagttctatctttacttgcgcttgccagaatgtttcctgccgcattataagataaagatgtaacacatttttcatgggcatatggaataacatgtaatggtttttccatatcttgtaaaatatcaaagtgtttgatagatccatcataactccccacagtaaaaacagattcattaattggatgccatagcagggtcatgttatctatttcatccctgacagtcatcaattccttcatgttatatcgaatatcaaaaattctacaaaatttatccttggaaatccctactaataaattaccattagttggctggaaccgtacttttaacactgtatgtttgaattttaatagtgtggagacacagttcccagatcttggatcccacagtttcaccagattatccttcgatcctgatacaatcagtcccatatgtggatgccaatcacaactcttcacatcccaatgatggcctttcaaaatagtctcttctttaccgttactaaaattccatatctttaatatgttgtcatctgaacaagtgacaaatttagaatcattattactaaaggatatgtcacgtatacattctgtgtgtgcagagtccaattctttaaccatattaaaattcggctgccatatctttatggtaccatctgagtcaccactaactaaccaatcaccagcatgcgaatattccatagcagtgactgcagaatcatgtgcctgcattaaactttcgaaattgaatgaagttccactccaaagactaaattccccattgtatgtggccactatcagtctcctaccctcaggagtccaacgaattgcaggaatcacatgcttgactttgtttgaacttaaatgagtgaatttgcttgttaaattaatgattcgatcatttcctttatattgatcaggtgctaagatatccactgtatatgatgtctccggttggatagtcggtatagataacccatgtctctttagataatatagtctattgaatggtgaagtcgcatccactgttcttctatgagaaatgtattttttcagagtagatgacccatctggtccctgactggcattattattagcagtaaaagtatccattagctgtgacactttgttgttaaaaacttatataaacaattatgctagtatttaaggatcatgtaaatacaattcataacaaattaaccatctcttggggcatggttctttactacactattaaaatttagtaatttcactttacttcaaaatctgaaatttgttttttttttttttttttttcattaataaagattgtatatattctatagaaaatgtatgtagagagattgaatgaggtagctaaaaggggagaagaaaataaacttagtaaactgttattgtaagtattgttataacactcttattaccgttgtttacaagtattctggatgatcttttatatatcttggataaaggaaccatacaacggtgaaggatgcgactaaaattgtagataagaaagggaagtactggattcccattatatgaagtagtatcccacatagataaggcagtgctgcaccaccacaaccacctaatgccacagcaatacctattccactgacatgcaatcttgcaggcaacactcgtaatgctacaatactcccagatgggaacagtgggccaataaagaacccacatgcaaacatgataataaacatgactccaaaatataagtttgacgtgctgtcgatcagcccaacaaacacaaacaaggtataaaatattagagttaacaatgagtatgtacgtgcacctctatattcattaacaaaagctctttttgtaacaaaccctagcactagtctgccacttgtaagacctatccaaaatgaggaagagatatatgccatcttgattctgtcttctgattttgtctgtagtaaatatgtaaagaaccatgcacctgtgttaatttctgcacctaaatatgcaaacaggaagatggaatataaacaaattgcaggcgtttgaaataattgaaagaacgattccttttcattatttttattgttgctgttaggatcaatattctcagattgattgtcttcagtattacatatgtaatcatattttaaggcagtctcatatttgaaagatggaatgataataatcattccaatgatggaaagagccaatggaataaggaaaaaaaaggaccaatgtccccatttatcgaagtgggttactataggaggtgtacaggttgcggctgcaccatagatagcatgcataatacccataatttcatttttatggaccaataaattaccaatcaaaacatttcccgaagcatctaagatcccaatggctaaacccaatggaaacacagaaaatgcatagataataaaactagatggttttaatgaaagaataacgaagaatataatacagatagaagcagcaataagcatccctcctctcataccaaactttgaatggatcctttcatttaacaacgatgctgatgtgtaacctatcaattgaattaaaaagatattagacgctttaacttgcgatatgttatattcttctaccaacgtggggatcaaagcacccatactttggtcattgaacccaaagactatgaacataattaaacacgctatgacttgccacttcactatactgtattgttgataatctagtggatacacttgaatttgatttcccttccactggacacttttccatacttctacaaattcctcttgttcattttcaatttcattttcttcagaattaacaagtatcttcccagtaacggtgtcattatcattatctttaactattttatttccgcttatcaaaggatcagtatcctgatttataccctgttctaatggatcatgcaggtcttccagagatttatttgtcgttaaaacatccaagttggataattcaatatgttttgagccggccatcacgattataacactatatttatttaactacagagatatctgtccacactgatatttccagcttctatttcatgacatatagatatttgctttttctcttccattgcttttttcttctgcgacttccaattcctcatcatctcttaagaattgttgcagtctttctgcatccactttaaactgaactttgtgaaattttctacatcaaagaaacagagataatatagcgaggaagaaagaagggtagtgaattatcgtggaaaatctgtataattctctctttctcttgctgtgtagatgtgtttactgttgtatatgtctattgatacctattattagaaaaaaaccatgtttatatgttggctatataaacagtagagttggaccacttttgagtgaagttgttttgcattttgtttcttaactcaaataagcagatatatacgcatattattatattataaatggctgtagactcgatatcgaaacatggtacaaagagtgtgttaccctcgaataggttagatacaggcaacaaatataatttctctcactactcaggtaacaagatttcatcgaactctgctggtttggtagggactcctgggttaggatccttttattttagcgtccaaaataggccaaaattgatgatgagatcgtcccatatagggagctatttttcacacgaggggcttatccatctaagtggagatggcaatattcaaaacgataatgcttttgatagttcacgaactaagaaatggaggtctaattctttggagcctattgaaagcaattgttacaaaagttccagtactagcagttcttctggtcttctatataaagttaaggttaagaaggaattagctagtatagatgctattcatgatccacaggcgtgtgcgattgtatgtgctggaaaatcacatctaggttattacaagttttccacgcaagatcgttctcttatttgtacacatgatattatcagttcttacaattctcaatgtaacagtttgcaatccaaaagatcaagacccattaaatttagtaccattgcagatgttaaaacaggattccaacaatatacaaatcatgtggccatatgtagtaattccaccattatatctgtatatgatatctctaagagacaaagctacgaatcggctatagtaaaatcgtttgctgaacatactagatcaattaatggatttgattttaacatgattcgcccacatctaattttaagtggagggcaagatggctgtcttaaaatatgggatctaagatctaatagtgcccaaaaacgatcgagtggttgtgacatcaacattaccagcacatttggatctattagagatacaaaatggatgcctgggtacaatttcgcctcatatgacgataaattgactcgagaaatgaaaagtcatggtggatacaaatttgcttcgattcatgattcaggtgctatcttgacgtttgatttgcgtcagcctacacagcctgaaaaaaaaataaatgctcatacaggtccaggtctttgtataaactggcatccccatcaagattatatcgtatctggtggcagagatgggaaatgttctctttggtatcttggggataaaaagcctaatgacaataacaacagtaatgataatggtattaatatggtctcatcacctcaattgcctaattcatatcaaaacacctattcaaataataacacagcctccaatttagcggtaatataccccgagactacaattaacataggttcccctatcacaaagttaaaattccgtccatattatgataaaaatgtttataattcaatgttagcgatatcttgcatgggtgacgaagcacaagtatccattcattcgttggctagaaggtatatccctaaacatattctacagacatctgcttctgctgttgggttagtatggtgggactcgaatattttgtttgacatagacaggaacaattatgtaaatggttgggatttgtctaaggaacctacagttttagaaactcttcctaaaatatgtactgcatggagggatattgaaggatatggatttacatacattgatcaagaagttggatcttataagagtaatcaagaagctcataaagttgtctcgccattgaagtgggaacgtccttctagaaaggaaatttcacccaatccatcgtctgtagtctcgtcttctggaataatcaatacacttgaaatgaataactcaattacgactagtgataaaataccaccaaaattgaaagcaacctatagttctaaaagtttactgtctacaaaatcatataattccaatacaaatttttccttgaaatctggcccctcaaaacaagaaattagtgaaaaatctccatatgttattacactggatttaccttacatttttaatgaaatgagacaaaagcaattgtctagaatgcaaaaagaactggttgaaacaaaaactaatatttttaaggaaatgccggttgaaacatttaaatacttagtcagaaaattaaattttttacttgaaaatgagaagaagaatatgagaaacgagctttccactgacggtgattcaactaaaacagaagatgaaagaaaaaaggaggatttgatgaagaaatttggatttacagaaaacgctacatggactgcattggtaaataaaaataatgatgaacgacgttcttctctatttgatagtcaatttgggattgaaagtaagaaaacaggaactgatatttcagatcatttaagaagtaaaaatgaatcaatcatgagcagtggtaacgattctgaattagtctctcatgttccaacaaaattatattcaaagaaaaaggacacaaaaactagtatgttgtcaaaagcattacaaaaaccacatatcaatagaaaagaaaagatacaaatactattaaaattaatagcagcagttaatcacaatgctaatgtttattcagatattggagatatatcaacttttaaagcgtggattgtcataagagatactttattttgggatttaaaaaagatggatgtattggatgaaaataacattattatagaggagcaaagtgaaaattcctcgaaggaatcacttattgatagtggatatatccagtctcccttttcagatgatagcccctatagttccaagatagccagtgttggacgggattctctttctttagttgaggaacaaccgcaagcacttcatgacgatagtaaagaactgaagagaaagcctgtgtctactttacaaaagcaacttcaagccagtaagaatgatactaatatgctatctcaagaaacaaatcaaacacaaaagataaatagtaatgatgagaaaagtttagttaataatctggaggtaaaaaatgataaatctttgatatcacaaagtgcaggtgatatttacaatggaaagggaatgcctatattaaagagaagacaaggaagattatcatttatagacacattcatgaatgacagaagacatttagttggattggtagatgaaactatgtcaaatcgttatgcaccttcagtgattaatagtagtccacagagtaaactttcttcatttcacagtgttacatccggttatttgcatgatccatttacgagtaaaattttatcacatatgggttcagcacatgaagtggagaatcaggtgttattagacaagtttttggaaaatggtagtataggatcatcgtctgatgaacattgtttatatgacagggatatgttcagtcacgaaaaaggtggagatgtttgtatgccaccatgggatacagctacaataattaaacaattataccagcaagccatagaatctgggaatactctacttggaatgaacattttattattgtttcatactatttacgacattctccctgaagaggtagtaaaaaacagtttagtagagtttgtaactattttgcacaggtttgaaacatttgaaatagctactgcattattaaaggcatgtccctgggatgatataatagggggtagttttgggcattcttcgtctatacaaatatactgtgacaaatgccataaacttttaataaatgaatattcaaaagaaagattcacgatagagagaaacaaccaaaatatcagaaaggagagagagattgccatggatgataacagcaatgatggtgataatgatgataaaataggtattgacattgacccaatgacaagatttggatattggtactgtgacaattgtaagaaaccaaatagtctttgtgtgtattgtgaaaaacctatgaaaaaactatctatagctctactatcatgtggtcatgaaggacattttgaatgcttccaagaatggtttttggatgagaacatggatacatgtccagcaggttgtaacatcgaattaaatctatgagatcaaaataatgcataaaaatcagatatatatagagatttggtatatacataaaattaatattctttcctctcaatcgcctggcacatgtcacaaattattattgcttcagatttttatttttatttttatctttatactcctattattttacccttttaggacatttgtgacaccagcttttgtgacccgcacttttatttcgtaccatgtgataaaactattggttgaaagctttgaaaaaaaaaaaatttaacaagagaagaaaagataatatagaaaatagaattggttgatgagtttgattagattaatattaacagttgttagtagtaattagtagaatgtctattctagtcactatgtctattaaactcttgtgaatcttttttttgtgtttttctgttttctgtcagagaccagaagctgaagtagagaacgccatgtctgttgaagaagttgctcagaaattagaaaacgtttccgttggtgaagaaccaaagacagtcttatctgatgccaccgaattcgaagtcaaacatcctttgaataccaaatggactttatggtacactaagccagctgtggacaagtctgaatcttggtctgatcttttaagaccagtgactactttccaaactgttgaagagttctgggccattttccaaaacattccagaaccacatgaattaccattgaagtctgactatcatgttttccgtaacgacattagaccagaatgggaagacgaatccaactctaaaggtggtaagtggtcctatcaaatcaaagccaagggtactgaaattgacgaattatggttaagaactttattggctgtcattggtgaaactattgatgaagaagattcccaaatcaacggtgttgtcttaagtattagaaaaggtggtaacaagtttgccttatggaccaagtctagcgacaaggaaccattagccaaaatcggtgccagattcaagcaagtcttaaagatcgaagacgatggtttacttgaattttacccacattctagcgcaaatgatagatttgctcaaccttccattgtattgtagattgaatattaagagaagtagttctgtataacaaccatttgaagtatatgttattgttattatttttttcttttttttttatattacctcctatctatgcactcgaatcggtacagtataattagttacatttgttcgcctccaatagacgaaacaaaaaataaaataagcaacaactgtaaccgataaatattccccaaatcttacgtttatgtttatatattatccacataaattatcttcaatcattacaaagtagaaatattgttaatttacttttcacattgtttttttttgttgtttaatattaatttaaaattttatataactaaagaaaagtatatataatagtacattatattgtacaatgtttgcgtttattttatatcatatttcttttgttatttttattttttttatttatagttttttttttttgaatggaaatatttgaaaatggtattgaagatagtctagaaacgagattttacaaaactacaacaaaattcatagagatgactatccttctgtacacgggaaacaaaaccacctgaaatcacaaataactcatacgtcataaaatggaggttttattaatttatttatttatttttcattttttctatataaacattgaaatataaaaatggatagtatataaaaaaaagataaaaaaaaaggatcagaacatatacattctatctcattaaattaaatgataatcatcacatttccatgttttgttttgctctttctttttttttttaatttttttctttttattctttctacctatttcttggcgtatacagcttcaacagctttttcaaagatgtctaaacccttttcaatattttcattttcaattgtcaaagcaggaacaaatctaacagtagtcttaccagcagtgatgatcaagagacccaattcccttgccttagcgaccacagcagctggggactcattgaaatcagcaccgatcatcaaacctttacctctaatttctttgatatgttctgggaatctatttttgatcttttccaaacggtcaaagaaaagttgactcttttgattaacttgttccagaaaagattggtttgcaatagtatcaaggacatatttgctgactgcacaacctaatggattaccaccgtaagtggtgccatggtcaccgacttgtaaactgctgttaactttttcattgaccaccgtggcagcgattgggaacccattgccaagtgctttggcgattgtgaaaatgtctggatgtgcctcctttggcaaatagctgtgagcccataatttcccagacctacccataccgcattggatctcgtcatggatcacgatgacgtcattctctgcgcagatttgcttcaagccaaccaaggtgtccacggggacaggcaagacaccaccttcaccttgaacgggttcgatgataagcccggcaattgagtccctaccatttttgataaagtcctgaagctttgtcaattgatcatttaagcttaagaaggaaacgtttggtattaggtcgccaaatggtgttctgtatttagcgttccatgtgacagataaggcgcccatggtacggccatggaaagagttttggaatgccacaataccttgtttctttgggtttttagagataccgtgtttcttggcaaatttcaaagctgcctcgttggcctcggtaccagaattacataagaacacttttgaagcgtcatgctggcccccaaattgcttggtgagctcgacaatcttctcacttagttgcaaacactcggcagaatagtatagattggaggaatggaccaacttgttggcctgttgatagagaatctgtgcgatttgaggattagaatggcccaaggaagtgacggctatacctgaggtgaaatcgataaactctttaccgtttacgtcgtcgtacaactttgcgttcagacctcttgtgagacataagtcgtttggtctagcataagttgtgacttggaattgggcgtccttaaggacatcctttagaatggagtttctaattagggcagatttggagaaagatctcttgaacatgatgcaacaggaggaaaaagagataatctagtaatactatttaatgagatgcgatagagatgcagacacttgagagctctcttatagggattaatccagatcgatgacttgtaaaaacatttctcgatgccaaggaaccaaaacaacaaaaacgaaaaaaaaaaaaaaaggagacatcaagaaagaaagagacttaaaggaaggggctaacgacgcccgtcgcagttgcttgcacttaacagtcactttttatatcaacacaagaagtctcggcttattgtttcctgtctttgttttttttgctctttgggaaaaaaaagtgagacaaaaagtttttctctcactttttttttctttttcgcgcaagaacaatagaacagaaacaatgaacaacaggaaaatgaccgttaagtgactcatatagcgagctggagggtaacctcttggatgtgtgagtttactggaattttctggattcccacaccaaaaaaagttaaaaaaaaaaaaaacagaaaaaacaaacaacagtcataatgatatttgtattaatatggcctcatcacctcaattgcttgattcgtatcaagacacctattcaaataatagcacagcctccaataaatagtatacaaatatatgtatgtatgtatttatgtgcatatatatatatatgtgtgtgtgtgtgtgtatgtatggaaacaaaaaaagaatggacttaacgttgattccatgaaagactgtttggatcagccacttttctaccactcatgaaccaggatgctaatagcaccaacgccattgccacacatatacacccacctatcaaataaactatacccaaaaacgtgttcttgccaccaatgcttgatccatgtgtaatgtatatccctttcttaccattgaattcagtgacaggccaatgtaaaccaatatcgatttgatattcacccgcaggtaacgtatcattgctgtttttacggatcagctttgctgatttgtcaaatgctgatggtctcatccagttttggaattcctcccattcatggatatcagggatattggtttcattatacccgtttggaaaacgcttctcccaatatggcggtggtgcaatctggctataattgtagcgcgttttcttgaatcttttcttgtcagaggaccaattaatacccttgtttgttaaggaatagttcttggaggtatccgtcacattagtcaactgcatggggaaagtatcgttaaacatcgcattagctatcaatccacacggatagtacaatttcccattactgtgacgagctaaaggtttacaattaatgcctgccgtatcatggatactggaatatgaagcagctttgccaactatttgatcctcgctaaaggataacacgtaacgtctatggttttgtgaaaaattttcaagaatataattaatatagacagttttcttaatatcttcgggcacatggaatcttatttcgcatgtaccacgttcactggagtcatcagacttatcatctacaaatctccattgtggtgctacattataagttttattcttatggaaatcatatttgtaatgactctccggcatgtctccaaaggaatcagtaggtgctgcagtaacacagtcttggtaatatattactagctcatcagtatgtgatgcaacagatagcagacaaccaccgactataacgaacacagctgccacaatcaaatatagaggcaacacagtttttggagtcagcacggggttgatagaagccagtctttgttgtgtaaaagcatcttcccggggtcttctatttttcaccttcttaggtataacttcgtcgtcttcaaactcagaggcatcaacatcttcttccacttcattttctgggccattactcaaagggtctttatctcttttacggaaagtggctcccacttgacttaagttgaaattcaccataattaatccatgcaagttctctaacctgttccaaaccaaagttttccaacgtcttactccattccaagggtgtgtgtcccactcttagccctataaaataactcttaagactcatttttagtgattcaccttcttcttaaaaagagaaaataaaaataaacataaaagataaaaaagaaaaaaaaaaaaaaaaacaacctagaaaaataaaataaaagtaaaatataacaagattaattattataaaattcataagactcaacacataaaaaaaaaaaaaaaaaaaaaaggataagaggaactggaaggggaataaaagatacattttaaagaatggatctatgcagatatctacagtatataagactatactgatgctgtattaacatgttcacagttggattgtcaaagtactgttactcaccatcccaaaaccgtaacaggtagccccgccgcctattatggtcaattttcgactctcttgttcccaaacaagttcaaagccaacaaacatcaggggagtctcttgccatatctttgatgggatgcttatactataaactttttctgtgtcaatatcaaccactatgatgtacgatgaagcatcaaacaaatctgatgaagacgtacctccaacaagaacaatcttggagtcgtcaataaatttcaatttagatccatatctttggaaaaaagggtgagagattactttaacttgggtaagattacatctgttggatttgtcggttaactgtacatcatagatatatatattatcggacatattatctgtctttggatcatatccacctgcaattactagtttgttcgtgccttttctaaaatccattgatgaggatatcaagtttggtattggatcacttatattgtccaggacagtccatttatttggtaaaggatcatatagtaacaaagacgaatctgtatcttttaatttctgaccgccaaatacaattacttctcctgttggtaaagccacgctacaatgtctaaaccttggttctggtaaatccatacgttgttcccacttactattctcaaaatcatacaaccaaacatctttatatggtttatgcggtgcatttcttcctcctattaaaagaaacgtatttgactgattctgtaatttaacaaaggtatgacaagttcttggtgaaggaacattctcctttgttgaattttcgatagcggtgagttcattgttatttaggtttattaataataattcattaactctatatggtgtacaaccaccaaaatataatattctgttctcatctaaagaggtagacgctccaaatgtcctcttaattatgctattttttattgatatattataggctggtctgtaatcagttataggtgtattgaatagaggtattttttcattattctgatccctatgtgtcctgcgtatacattcattgttatcaaataaataaggatcgcgaaaggtgaaatttggatcatttgctgagtgaactaatatataatggtgacagaataagtgaaattcttccaactcatcgaatggttgaatactttcaatagtatcttttatctcagaaggcaacttgtgccataattgaaacatgtcaccggcattactcttcacataacccaattttttaaacctatctatctgagattgtaaagtttgatatttggttacggatagtaatggagaattattgcttgtaaaatgcttcaacatttgttttgcaaagggttcataaggacctttagggatcaattgttccaaaataataaagtgtgattgtggtaattgcgatgttattctaatgatttcgtctgataattccggtttcatataagccaaagacacttctgcaatgaagatcttagtgttattattgtcatatagaaagggtaaatcatcttttgattgcagcaataacttacagaacgatttggtatcattcaagtcacaaggtctaatgaagtaattagaagaagtaaatcgatccggcttatcattgtgactattactgttattgttgttgttgttgttgttactgtctgaagattccatatttgtaccaacgatatcagataacagagcattgtttgatattatttgaatctttttcatcaagagatctgagtaatctatatctaaaaatatacatctatcctgatatttactacttgatttattctgtgaatctagtagttggaatggtaaaggatcaaatccacagcctagattgattatgactagttttgagtcttggtcagacaatatagaatccaatcttgatctaattgcatgtagccgtaaccaataacctctgttaatacacggggatctgttaacaaacttggggacaaaaaacttgagatattccaatagttcgccagtgtatttatttctattgatattgtcaaatttagggtaatatattgattcaacagatcttttagatacaattgaggagttgtttgtactctggacagctaaatctggatacttctcccttcttgtctgtttatcaacagttaataaagggttaatcagtgggtccataattgatatactagctgggaatgaaagcaaatcttttctatttttacttatttgatacttctaatgaatgtattattgttattattatagcattagattatttctttctatttagtaatagaatagccatgtataaatatgtaaacatacgtgaaccatataacttatttgtatcttttgaagatattttagagctcatcgaaacagtgaaactcttcattttgcttcacagagcaacttatgtgaaaaaaaaaagaaaaaaaaaaaagaaaaaaaaagtacaataaaatagaaaagattatttagctcactactatacgaagaataataaaacaaacataaatgtatatagatagatcgggggaaactaaaagtgggtgtgtgtatttcttattcatctactgtatttgataatattttgaattgattttttatgatctgactatattgattgattgaactctttgaacattgtaagatggatctataacaagccaaggtattttttatgtcgtcacatttcacccaaactttaccattgacaccaacagcaacctcgaacttgcaaaacttggatagcatccgtagcagagggaattgatcatcgaacagaagttttctgcagaaggacagaggcacatctacacagacaccatcttccaagagaccgaaccctgaatcttgaccagtagaagagtccatgcactcgatctctgcctctagttcctttgcagctgttagcactcttgcatataccagatcaccaatcttcaaagtgggtctatttttcttagtagcattggggaaagacatgtaggagagtgagactgtttgggagaagtttgatagagccactttataagaatctgaaaatgcactaacgattgttccaatgacgaagtcccctactgcacagatgtatctccttgaatcatagtctatatatactagttggttgttccctcttgaattcaattgcacgttttctaatcctgcatttacagggatgatatcctgagtcttagggtcgcagtatacacccggacccagagtaatgggcacctccggatttaaatccaatttatcaccaggtaagaccaatttgtatgtatttggatcatttacagtaactgaactcgagtctaatgaaaccgacatactttttcttctttttttttctatcttatataaaagctgattgggaagggggaaggtattctttttctttttcttgtataactctttttattgctatagaacaaccaccactagacaaaaaaagagtgtagaagaaagcacactaagagtaggtaaacacaatacgcatggaatgatagacaaatagttgtcagacagattttcaaagtagtttcttgtctgtataggtgtgctttacttcctctttctttagagggcatttcttctttttgggttctttctttctttctttctttctgtcaactttgaatatttttcagaagaaacaattcaaaaagaaaaaaaaaaataaaaataaaaaaaatagcagcattttgtaacactgacaccaataaaataaccccctcccttattttgtttttttttctttagtactgatcgttaatcataaacattgtagttaactagtgctgttataattgctgagtttctttccagactgtcttttgtttagtcgtaatgttttatagttctccagattttcttctatactaaagcatcacacactattttgttttatttttgtttaaccctaatctttttagtggtgggaaaaggggaaaagacggaatgattgtttcaaccctcattttgattatccctaattgttagggttgatgtaaaacctgttgagaaattccgcctattttccgccacttcttgcaacagcggaatttgttttttgttttttggtttttgttttttgtttttgtttttgtttttgttttttgttttttcttaattttttattgcagaacatctgtcagtttattaaaaagagagaaacagatagatatagagaaagaaagagagaaatacatacaactgtttgtgtaaaagagaacacttcccttcttcttctttcttataacatagatcagatataaaggcacataaactaaggtgttcccttctccttttctctctttatataattctcgaatctatcacattttatcaccatggtatatgaagctaaaccatttgatccaatcactgtgaaaccaaacgaaaaaaaacgggtagcatatttttatgatgcagatgtaggcaattatgcatatggggcaggccacccaatgaaaccacacagaataagaatggctcactctctaatcatgaactacggtctatataagaaaatggagatctatagagccaaacccgccacaaaacaagaaatgtgccagtttcacacagacgaatacatagatttcttgtcccgtatcactcctgataatttagaaatgtttaaaaaggagagtgtcaagtttaatgttggtgatgattgtccagtgtttgatggtttatatgaatattgtagcatatccggtggtggttcaatggagagtgctgctagactaaatagaggcaagtgtgatatcgccatcaattatgccggtggcttgcaccatgctaaaaaatctgaagcttctgggttctgctatctaaatgacattgtgcttggtatcatagaactcttaagataccacccaagagtcctttatatagacatcgacgtacatcatggtgacggtgtagaagaggcgttctacacaacagatagagtcatgacctgttcattccataagtatggtgaatttttccctgggacgggtgaattaagagatataggtgtaggttcagggaaatattatgccgtgaatgtacctttgagagatgggatcgatgatgcaacttataaatcagtgttcgagcctgtagtaagcaaaattatggaatggtaccaaccttccgctgttgtcctacaatgtggtggtgattctttgtctggtgacagactaggttgtttcaatttatcgatgcaaggacatgccaactgtgtcaattttgttaaatccttcaacattccaatgatggtggtaggtggtggtggttacacaatgagaaatgtggcaagaacatggtgtttcgaaacaggtctgctaaataatgtcattttggattctgaattgccatataacgattattatgaatattatggaccggattataaactagacgttagaccgtcaaacatgtttaatgtcaatagtcctgaatatctagatcatattctaacgtcaatcttcaaaaacttagagcatactaaatatgcaccaagtgtacaattaaatcatgtacctaaggatagagaagatcctggcgatgtagaggaagacacagaggaggcaaaggagactaaaggtggatcccagtatgctagagatcaaatagtagaaaatagaaatgagttttattagtagatatagcatttaaagcaacgtatccaactttttcttttctttttagtataattattattgctgttattattttaaaatagaatgaagttacgatatcttttttttttccttttttgttgagaattagcatttgtaagtatttggtaagttggacacattcccgattatagttaataatattaaaaattgaagtgaagttctttgttctttctctttatacacaagatagaaatgataatatatataaaaaatgtaaataaactaagaaatatgatatatgaaaattcttaattatatataaatatattgatataatgagcggattttcatccatgaacacctgaaaatcaactaagtaggcgtatagaagtttaatcatatgtaattgatacttattgttgaaataaaatgttctataatgaaatagatagaacaataagattttagcagacactaaacgataaattattgagtaataattgttgagaggtcatcaaaagttattgagtttgtttattgaatatcttactgttcgtagaggaaaatggctgaatgttaacatatataaagccaaggatttcgtcatacattatttttatcttatttacaatctttgtatattattatttttatgttgtatatagagaaagaaagtgaagaactttattataattttgtatactaaatttatttaatataatattgagaatttttcctatatacccaatgaataaagacgctcattgtcaacacttatccagtatattattgagtgaaatctgtaaatatttgtttagtttgtatattttattctaaaaaaaatcctatttctatcaactattgtatagaaattacctaatataattatctaaacgaattatgataatttccattttaacttttctataacttcaagtaatttcattttgttaaaggaacaaatgtaactttttataaggaacatctaaattctgaaaaaacaaaaattatgcatgagaaagtcatattcagagatcctcacgtatataccatatagttaacgttgaatgatgaaattaggaactcagaacaacaaaaacttaaatcataagctttaaatgtatttgaaaaattgccagctcaacactacttacatattaccgagaaacttatttaagaaacctctgattattaagcatttatgacagaggcaattgtaagcataatcattcttattatgtacctgtcaggttctaattgagaaataaattaatattaatgataaaaacaagatttacataattaatttgtgaatataatgtacataatatcaatatacccattttagcatgtaacttgaaatagcgccttaacctaggatgttaaactaagagtacatattacaatgaactgtcaaatcattttctcatactattaggatctttatttatataaagggattaaaattaacatacttttcgaaggtatttattaataaatacaagagatgatcttaaataaataatattagatctatctacaggtactcagacatgaaaacagtagaattttcttgccatgtcataaaaaatttctcattacaaataatcatcattttttttgctgatattatgtagacataaaaaaagtaacaattaaaccaattttatctagaagatacagagagttcaatatttaacaaagctgaatgacgaggaacaaaactggaaataacatacaacgttttttctttcataaagataagcctagacctgcttttatttctctttttttaccatagatatatataagattatttgaaatatttgagcataatgaattaggtaagtaaggttaaatatttgttctatacaatctcctttacatatatatatatttaatttttttttcaattattttatactaggatagtttaaatttgaatttgagataaatagtatataattcatagccaactggaaagatattcatttgaaataccaacatacagtaaaaggaaaacaaatacaaactaatcgttgtttttcatcttctaagcttatatgacttttaaatcatgtcggttttgtttgatgacattgatttatacccctttccttagagattataaacttgaatgataaatattcaatatgctattttagctaaattaaatgcatatctgaagatgctcgtaataaaacttctttattattccacattttgttatggctaatcatccacaagaaatcttttcattgttttccctctctacgtatcttgttactataaatcattaagaaaacatactgtaacgttcttatcccattaaaaaaaacacactctaatttatcccatcacctgcacacattaaatgtataattgtcactactttcttcaagctaacatatctctttgctttgttcacccgctttctgggcttcatcactcataagtgactttaaataatagtcatcgtcattaaaatgttatgataacgtcttcgtcccaagtgatgtctttttgatcttttccttcatcgaaactcaaatgaaagagtcttacaatatttcaagacatatctatgtataatacacaagttataagagatatcactgtatgatatggtaataacatccatttagagatatccacaattttgttaaaaaggcctttctttgtaataattccattttttttcctttccttttctttatttttaagttaatcagtgcttaagaatatattcccatattaatattattaaccatatatatatatataacattaatcaaataacttaataagaaaatgagtagtgggaaaggtgatgttggaattccagttaatgttgttggttcaagttatgtaaacattgggattcaagggggtgctgttaacgttcctcaaaaagtacccaataataataataatgctgatactaataacagacctaccatgtcgcccataatgataaacaatcaaaatacatctaatagcagtcctaaaaatagtaatatggcaaagaatatccataccaataataataataataataatacgaatgccaccacaaattctatcaataatacaaacaacatggatgtcaatacggtaacgaataaaagtctgtctcctgctgaaattcaacaacgacaaaaattgttactgcaacagagagcgttacaacaacaacaagctatgcaaaattttgaaaaccaattctttcaattattaatgactttaaacaaaaaaccaaagcgtatttataattttgtagaagaaacagatttaattttgcagaaatatgaacaatatagaccaagttttgagctccatatctacgaggatatattcaaaatatgtgccccatcaaattcaagatttcaacaacaacaacaggtcgatagtaatcaaataaatagtccgaatgttaataacaagaataataataatcagagaaccagtactgttcataatgatggccttatcctagaaaaggacgatcaaactctaaaagaatttcttgaatatgtggccaggggacgtattccagaagcgataatggaagtgctaagagatagcaatatccaattttatgaaagtaatttaattttacaagtttatgatcatacaaatacagtagaagttaccattagtagacctgtgaacaaagactctatgaataatttattacccaataatatacaaggagatgtttcaaatacacaaggacaaaatcaacaagcactaaataaacaaataagaaaatttagacgacctagggtatacagaactttactgagacctaatgatctgactaattactacgacatgatgacatatgctgaccaagctagattttcagatagtatatatcaacagtttgaatcagagatcctttctttaactaaaagaaatatcaaattagatgtggatttaaatcctttcgaacaccgagaaaaaattgatgaagatgaattttgtgaaccaaaattcaatgaaaacacgaaggctatggaatttgttcataaaaaggaatctacagaggatggaacaaagggtaaagttggacacataccagaacatgaagaaacgccccaaagtatatctaactatgaacaattaatgctaataatgagcgagagaacctctacaataacaaagtcaacactggctacttcattggcagaagtctccaaaaaacaaaatagtaatattaccagtaataataataatggattagagactagtagaaattcttcaatatcattgaattctataccgggatcatcctctggtggatttaaatcttctggattaacgacaactgcaaacagtgcaaatctcacgaatcttacaacagcacttgttttatctaaaacaaagtctactgcaacatcctcaagtgaaaagtctaataatgaaaatactcgcttcagcagattgaaatttattgaacaatggaaaatcaatgtggaaaagaggaaacaacaaatggtattaagcaataatgataataatgctaatggactaccggattatttagtcctaggaactccatttatgacaaaaatatctatgacagttcctatgacaccgcaggctcaattactacaacaacaaaagcaatttcaaaaatttcagcaacaacaacagcagcaacaacagccaattcaaactaaggaaaagaaaaccactggaaaaggtattaaacatggtgcaagtggtgcaactgaaaaaccaaaagcaaagagaaccaaaaaaacaaaaaaggatactgatggagctcaacagacacccaaacgtaaaagagttagtaaaaaaaagcaagtagcagcagacagtaacaatatcacggctgccagtccaaaaagtcaaccggcatccactattggcacacctatataaaaaaacgtatcagaataattataaattattgcattatacatatttgtatatagatatactataatatggttttcacgcattttgtaatcgtttcaaaaatttccaacaaataactattgttctagggttagttcaatcacacacacagacacacagacacacactttttttttttatttttttatttaagcaaacgaatcctttggttcgttctccaataaatatttaattaattcataaatattctgtctatctgcgacagtgtgtatccatattccatatacttcatgctttaaattcttaatgataactaaatcatctttgacttcaacacctataagttctaatggattctttgcatcttcaactggatcaaatatttttcgcttatttataacgctattgggtacaattcccattgaaaaattatcaggattgatcctatttaacactattagtccgtagttatatatatcttttccttgtaatactgaaccactactgttttgttgtgtactataacaaccatttttatttgcattctttaaaatagttttctgatttaaatttattgtgttattattaatatttgcaacattttcttgtaaaagctgattatcattatcttcataactaggtagaatgttagtcccatcaccaatatctcttaaatatatggccaatacaccttggtagtctaatttattccattcatctttgtggaaatcccatttgtagatggaagcatgtggtgtatgaaataacaattgtttaattttaggatcatatcttcctataacattaaaattcaatgcctttctatagaattctaatgcagtgctatttgtgtctatggtggacatggtttaataggagatataataacagtataattttagaaaaaaaactataagcttatatgatgctttccaatgtaacttttcgtaagtattcctgtgaagaaggtttatgctgttgttgctttaagcattactattactgttatactgtttgacagtgcttaactttagttttttaacactttatttatttatttattttgaaattgtgcacatggaagacaaatttgtgtggtgaaaaattttttttataaaaaatgcaccacctacaagtgatgaaagattcttggccaattttagaaaatacacaattaatgataaagaaatgtcttttgtcgagtccttttaactgccaatgacatataaaaggctcacaattgacattttgctacaaaacccaggtagcagacagtttctagaggataataaaagttttttagaattttttttattttgtgaacttctggatttgaccttctattaatgatataactaatgcaaattctttttttcaattaaaattgtatatattaactgaagtgaccttctatcctaggtatattttaagattttttgatagctggaaatctttgattgtcatatctatctctcccaaaaaaaaattaaccaattatatacacaacatagtattgtagcaggaatgctgaatcagtattgccaggaacggtagttagtggaattgatgaattaacaggagttaagggtagctgattcatatcatttatgtctatttgtctaatagtatcttccgcatcagcgcgagtgtctgtggatgcatcagtggttggtatatttaagtctgcttcagcaccattttgtagtagtagagtatcagtagataatggagcttcattggaaatagataacgatggagagaaagtagtagtaggtaaaactaaagaaccatgattgtcagtgagaacatctacagttttgtcaccagtagtagatataaatgatgtgatgagatcatcgaaaatagaatcagtgtactcttcatttgtgtcaacctctataccatttttaattgggacaaaattggaaaaagataccaccctacgtttagttaggaggtaaaataaatagccataagattcagcatctggtattagagcaaaacctttttcacctctgacatgtaatttggaggcagttttattgaggttaatgatgaccggttgaccgaatggtagcagtgacttggtatcaagtcctagtaaaccgactttagactaaggtgaatccctcatagaactgttatatatggaattacggattatagttgcatattgcacagcgtaataccataggtggtgtgggagttttgcgctattcataatagtacgacaatcatttaataatgttaaatttaatcattccgcaacattgtgagcttgggaatcacctgcatcgatatacacaatttgaatactgttttcagaaagaaaagttttcactgcagagttagtgtactctgttccccggtcaaactggaattttaatatgggggttttgaattgtcgctcaatagtcgcaataaaggacttgaggacatataggatcgttgcatcatctttccgttttaataaataagtccacttaaattttgagacatttcttacataacatgatgttgaagctgacctacatataaaaaccactaacgcagaagatacaattagaccaacagacataaatgatgtgaatcaactatctttaactcccgttgattcatcaatcccaccatcgaccgttcctattactgatactgtcgtctcattcaacccaaccacaaatgaatcttctccccccctcaacacccgctgatttttcatcccaacttgtacctatctctgctgttaaattctatattgaccataggactttgaatggtacaaattctactaaaaatagacagaaatgagaacgagataaaagagcagaggcatgtatttctaaacacagaaagacaacaaaaatatatttcctaaactatgtcactgctacccaccatatggtaagtcaactaatcaacaaagaaaattattagcgtagatccatatattaattggcgattgttagttggtaataccatgtcatcaacaaaaagacatactatcacgattgaatgattgattctttgataaaatacacaaggccatcctggtacaaaattcatatggcaactattaataataaaattggttatcttcttataccagtttgcaccagactgtttcaaaccgtaaagtgacttctttactctatgcactgtatttcgtaatcctaaatggggtagagaacgaatgtatagttcttcttctaatggagcatacaagtaagcagatgatatatctaattgtataatatcatagttgttttgtaaagctattgataaacaggacattagagcgtaatgatgaactgtgcttgacatcaaatctggttggtaagtcgaagctttttgttggtctcccctagcaactaacctacatttgtggcgaccatctcgcttgacgttaaaaataaacatagagttaataattttggacttatcaacctcagcagcacttatcgtttcttctgatcaagtattcatccttagcaactgcgttaattcgtcattgtacgctttttggaatctttctttctctataagatccttattaaacgcaattacctgtgaatatatcttccaactccaattatagtttgaaaccaaatttgttaatgatagtactcaagaaattatttaacacgatagtctcggtctaaaaatgaaatatgtgaaggagttatccattaaaatgaatatgaccaaggtcttagaaaaaaaaattccaaacctaattgtataccttaacaaaaataggatagctccaggaactccgaatgaaataatgaaagaaagtgagttttaccctacagaacgagcgtatagaactaaagttaattgatctataagtagtatgttgaaatcaaatgttctaatataaatagatagatcaattaaattttagtaaatgcagccaatattctttttcacatcatgtttcttctcttattcctcttttatatatcatcatctgtatattatatatagagaaggaaaccgaagaacttaaataaaactttacatactatatatatctaattataatactgagaatgtttattatatattcaatcacatcagatactcattctcaacaaacgaacatcttcttttggcaacatagtaagagtaacagtaaaacataaaaattgttaatgttcgatgacaaataatgaaataacaaaaccatagtaagttaactgaacattaataaataatttatatgtattaatataattagagtttagtttaatgaactagcatagaaaagaacactttagataaacttctatccagagaacttgaaatgctaatgtactttatttaatagttgaactatgataatatctaagaaggtatattgatattttaaaaacacaacatatattatcacactatgaatatataccaatccatgttagaaataaaatacaccactgcatattgaaatccggttttctatttaatgaaagttccaacatcactatttagagataattactacaaatactctcttctccttttcttctcttaatctacttttcatctcatcgttgatggaaaaactgctgcagcaaaaaaattctgtgatgacatcgagaaaaaatatttaaaaattttaaaaaatacaaagcacgtaactgtgctttgaccagtatattcctttgtgagtgttaagtagctagtttaaacaatgaatgctacgattagaatatatttcatgttgtatccgctagatttctccagtgtggttcactctatactttcccactagccttttgaaagtattttctgtttatttactgtacactagaaagaacgagtatataagaacactaaacacaacattctaagaatgacattgccaatttaaaagtatattagaatatcaatcacccaaggattgaagaacaacccggagtaatgactaatgtgcatacaatttgaacaattacaagcaacaatatttaatacatatattttattgtagttaggttaagtcatataaatattatttctagagactgtatttttgtgatgttgcataacaaatttacaagaagtaactaatgtgatgttcctaattacatattccatttgatggacactatatagggttcttactggttcaagcaaagttgtactagatgaccatattgtaatagaactagttgaaatattcacaagtacgtaccacatgaactatttgaaatattgtgtgctatttttatcgagcagagttggtttcgtgcattcttaagtattatacttatactgtattgaaaaacattaagatataagacagctgacaaatataatagtggtattctataataactacttttttattgtggaaatttcattctaatatataacaatagaagtaacatagaatataaggtataatgaaggcgtgatattttacaaagattagtaaaaaagtatggaaatgtgatgatgtatcagtggtgagaagatacgtttatccaaaggttataatattattatgaataataaacacagaataagttatatgaaacaattattcgaagaagagataatgtaatatatctgaatttcacgaagcaaacagatggatgtgaaaaaatagtagtttggtaaagttgatatttcattgtcatgataactcttgaaagagagtaagaatatatatgttgaaatacaatggtaagaaaagagaacttctaagaattaaataacaaacaaatgaccaatataaaaggggtattaagatgttataagaaatgataaaataggataaataaagtgatactgttagaataagaaattgattggtaaaagaattaataacagtgtgctaatggagatcactgtctatttataaataaaaacaagattcaaccatgaaatttttgaacaatattagattctcgtgatcatgctttttgaattttattgaactaatttaaagaggaaatacatatagaataggattagatgtaacatagttgagtatattgtattttgttgatgtgcaggaattagtaaatgaaagtgattgttgattgcgaatgcacatgctaattatttccatatgatataaaaagatattactatgcaaatagtatatcaaaaaacaaaacaagatcataattcaacaactgtatggataagaatgattgtatattgctagattgtgataatgattaaatcatataaacaaataaagaattataaaggtgttgaagcattttcattgtcaattaaatatggaaataatatactggcaaaaaatacggtaatctaagtaagtttatattgttgtgtgttcttgttgctagaatcatattactcttgtgtttcttgagatgatatttcagaacttgtaaaatattattattaaaaaatgaaaaaagaagtggactataaaactatgaggaagtaaaaataactgcaggagtggtagtcgcttaataagtgcttgttaatagaatgaaacaaatgtatttgatatattgcagatgttatgatttagtttgacacagcaaatttgtactatgaagtagagtgtaaggagattacattcttgatattgtgaaaggcatgaacactaaatgatacttgtatataacgagaaatgatgatatatcaatatgtgatattgaaactgtactgtatattcttaaaaattaatatttaatggataatagtaatgagagagataaatatatgtagttatatgtgagatcagtaataaaaagaattttttagagtgtaccgttgagatagtatttccagtaaatgtgaagtggaaatgtacatttaaaagtaattatataccaaggtgtatatatatttaaataacactactgtgttgtcagtagtattttatgtatataatctagtattagtagtctgcttcatacgatatattattcttcacacacatggatcctcatactattttatgaacatatcaatactgtcaattgatatatacagctccttatatcgtgatttattaactctccttataagatatcttaattattattaaataacagtacttactaaatatgctataccatatggaaatataggtctatctaagctgttattttatatattattatggtatatattaatacaaatgaacatataataagtatattgattaatatcccccattgaatatttattacaatatataaaagatatatatatacatagagttgattattataaataggaattaggggataaactaccaggtaagctaacaacttttaagtctgaaacaagttgattcgataatatatatataataattaaagaggaaacgtgcagagaatattattcaatcctaacacagttgtattttagctagttagggtttgatttagttattactattccatatagagaatacttctaatgctagaatttcatgaagaaactaaataatagagaaaaatgaactatcttttacacaccatcatctcactatttatacctcatataaagtgacttgtccgttttacttaatgattaagaaaatgtataatataattgaccttcttattattttaataggccctttatatggatttctatgattcattagcataaagtatatattatccttaaattattattaaatacaatatgtgtttataataattttaataaacatataaatattcttgatatgtttaatacttgtaaagatataaattattatatacaataagtaagttgaaatgcttgtccaaagaaagatcgctaatgttaggtatcagtaaatatgattgttagatcactttgaaactcaactactgttaataagtttaagcactagaactgtcacaacatatacaattttccatatcatttcgttacgactaacagatggagagtacttaatgatgtaatttgtgatggtattatcagttagtgaacaagaagatacaaaattaaacctgaagaaataataaatatatgttaaaattctagtaatttgtatagtttattaagttttatggtataagtattttatatatgtataaaaatagtttagtattatttatattgcataacacagcattgcttaatatcaaaatatgatacttgatcagacataaaataaattgctattatagggatatactctgtagaagtataataatttattatatgtacaatgaaagcatatagagatgtagttaataaacacctatatgatattagtatggaagaatcaacacgtgatagtatagcatttgttttttaatagataaatttaagattggaatatttaatattatattgatattcatactatgcaagaatcggtttaaaataagtattaaaaactttcaatattatatgaagataaaataaaagctaataaaaacaaatattatagaaatagatgataatagtatgtgagaattagtataataattattactgaatattgtagggatgcaatgggattgtattgaataagaaaaactatagtgttttacaaagtagttaacataactcaggcagcatttttaatagaagaacaatgatcttctattacgtcattcgtattcacatatctgtgataaactacttggaaatataaaccttgttgtggtttcacttcaaagtatgctggaagagctgttaggaaatggtgttaatagtaaatagaaactgaacttttacgaaatgtatacagctgagcaaaacagtaaagatgaagattgggaaatatcatagcatatgtgtcttgcacacaccgataattgggttcattggatccaatgtgatacaggtcattaattgccactcttcctttttgattcctattcactattattacttttctatcaggctgcagttgttgtatcgtaaactactatctatatgagtttgaattaactatatttgtatatgatagattacaccactttagaagtttcaagtgttcagtgatatgataccaaacgctaccaattgtgataaccttatgattattaatttctgataatagtcgacttggaattaatattaatagataacttggatagataaaagatgtagactcactctatatctccagacctaataataaaaatgtaactttaccaatataaccaatattgactaagtaatacatattacataatgggatccatgatctaacttaacactttttttagatctcatatttaattaccaacaattattaatagttaatagctacctggactcttactatatgcattatctatgagacataatagaagttattgttgagaattagcacctttatgtattgaataaaccagatatattctcaattgtattctatgactattatgtaattatttgtacacagaattatagcaatgttctttactttttatgcagaacatgcttttaataatatacaaaaagtgcaaataaaattaaggtatgatacgagaaaatctttagttttatttatatggatatcaagtgattttcctccacgaacagtaaaatatgtataaatagtttcgttgtttgttatctgttataatctcattttttctatgtatttcattctggaatattttatttcaagagaataagaaaatttatctaagatgttattgacactagcagtcatatgttaattcatggtctctgtatcaaaacctttttaaaaattattataatattaacatgatgaactgatataaacttataatagaatattggtagtatgatgagttctcagtttacttataatagggttggtggtgctgtgaatttatctcatgttgcttagttttttattctacataactaaaatacatgatattgtgtcactcatttaatatgataaatttagattactaaagatatcttcaattatatttcaataagccataaacacagcaataccctataacaccacgacaatatctcactagtcagatttatttctatacattatattctcttctctctatcatacatttaatattttgaagtgctatgtgcattaatacatctacttctactgatatcctagtaatagctcttattaaattacactacccactacaactatcactttgcacaatactatcttttattgtgtattatgccataccatagcaaacaatatagaatagccacttattcattcttacacgactttcttgatctagacctactggttagttaatataacactgcttgcagaactgtaactgccaaaatatgctaaaattgtcttcttatcttttcattctttttcttttctgaaatccaatttttcttaaattccaaaaacttttttcaatcaaataaaaacaactcaaacagatatcaatcactgcaccacacaaacactgatgtaaacaatacaaaggaaacctgcttacagacaagaacacatcctcagttgagatctatgcacttcacaaattcacattatataacattgagatactcccattcaacatgatataattattccataaatatatttgatacagccaaccaagatatccttaactatagagagtatattcacgacaatccactttgtacatgggttattactaaggaagatatttataaacaaaatacatctatctttatggtatggttgctctattgctatgagtatttacaaatacataaacacaaacacttacagtatcttttacctaaatgatataatctgataacatatcaatttcacatagtgatcacttcaatactactaccatgaaatctattcatatggatgaacctcacagtataattatcaacactatgccaactatcatcgtactactacccaactacatcacaaatattgcattaaaatcactcacaaaaatacaccctaccaataaccaagattaaatttcttcatgaaaatttattcattattactgactgtcaagtggtaaaattccataatactgttgtcagttcttacaacaccaacataatatccaacaatgaacaatattaaatcaaataatacacatatatgaacatgtaattatactgtaattaaaaacaaaaatggtttaagtgcgagatacacaacagaaagtaggttttttactgatctgtaggaattattttatctgagttaccatatttatatacaattgagaaaagtggaatagtatttgttttgagtattactatcaaatgataaattgatttttcctactttatacagtgttatctaacttattcaaacaaagaaccttagtttagcttgagtaatcaatttacaagatgctatgagatatttaatacaataaagcaggatgtttttttctatgaaacagcagctttcagcaaatgtctatcttttgtggataaaaatcaatgtcatatagcgtattaatgctataagctattttttatcgctatgagttatgtctgggttaggtgtaaagttttttattgtgcttttatatgatttcactctctaacttttgaacatatactgaatgatattcaatacagttacgtgaattatcctctagtcatttttggtttagttctctaatgaattgtacaacatcaatactttcctaattcaaatgtttttagttgcagttgctatttagtcaactagtgataatacaaaatcatctgctgttagaatattgcaatttacaatgatgatgtcattaaataaagaaaaataaatttggagacatactaaatttttattaaggtttgtaataatactagtagatgtcattcttgttgggataaaatttaccacatgatttattaacaatcaagttattttatttgtacatctgtatgtattgaaatgattaaaagttgaaatgttctttgattaattaaaatttactgaatttgaaaaagataaagaatgagaaagagttaggggtatagtatatagagacctgcttgagttagtgtattacataagtcagaaatgtttgacttattagatagtaagatgttatttagtatagttgtaatgatcattattatatgttatctgatgattaactaatcatattaatatataaatctattttaatagtataaaagcattctaaataatgatagctttcttgattgtaatatgaataattaataatattgataacattaaaaatatcttcagtaagtaatggtagcgggtttagttattgctcatatagattatcatctctgtttatctcattatcatagtgttatattagtattaggataatcaaagagatcattttaatacaatgaactgtagtatcacaaataattctgttaaattaatacaatcaataatttactagtgagatgtttataatgtagaatataattataaatatatcattggaagaattgttaaatcatttataacagattaggtagtttgaaacatgttagttatgttcttgttctaatacttatattcatattggtaatattacagttcagatccaagatatcacacattttagagtagataacaaatcattcccagtataataattaataagttattgtacatatttagaatttgtttatattatttattatccagaatgtttaaagttgtaattcacttcaaaatttattctgctatgtctaacaaagagtaataaaattatcagatgattgggatatgagtagaataaataatattcattaacattactacaataaaattaatacatccatgtaagtttaaagattcattagttattcttgctatcatattacagtcagttgatattttgttcatatgataatcattaaacatacaataaaataataggcaatcatttcttttagactgaaggtattgaggggaagtggttgagtattcttagacaatcatatttataaaaaagtaacatcattgatagatatcttcactaatgataatatatgtattaggtaggctgtctatagcttaaaatatctcagttagttgtattgagtatagttaaatataaaaacttttttttctcaaaattaactttctgaaacgtataaatagtcaagatatagaagttagaaataatttcttttacttacgactttatatacgtaatacacagttttgtaataatatatgtattatttaatactgtgagcgattacttataaaaatacggttcgtgaagttccattataacttataggttattactccacaccttttaaatttcaacagctacaaaatatgtttacattgctgttccagcttattttgaattacaaaaaattttcaaatttattaccgaagaagaaaattatgagaaagaaagaaaactattattaactttgtagaatattaaatataaaaagcaaaagccgtccatatctatgttaaataaaattttatctaatctttattttgggattagaaccctgagaatacttccttatacaactattacgattttcaaattattagttacaagttgtagaaagtactaaaaactagtaagcacttaacatagtatgtggaatattgttaagaacatgaacaatctaaacctatctgaaaacttctggcccaattatgtgaatcatgatagggtgtcttagaaaaaaactattggaatactcttttactatataaatccttgattatttgtacaatatgaataatatacataacttatagaaatatgaaataaacactctaacactacttaatcttattcatggattatggctaccctattatattgaaattcctatggtaattattaaaaaaacaaaaaaacgagtccaacagatagtgattatgactatattttgaataataaaagactacaaatgttgctaacttcctgtgtcacacttggaccaatagatattgttaccaacggaagcaatatacatacgccatgatatttgccaatcttgagttttgtcatcctgttcatacgtgtacattttataatagtcactaacccaacttccatcaacgtcattagtcaaaatttcttctaacatattctctagttctccacttttatatattccaccccattcagattgatttgcacagtaatcaagtgccatataggcgttacataaaggtgcataaaccggatagtttgctcttttgctgagattagcattatttccgttccatatcccaacctgtgtcattgcaacagcaccagtagactcagaatgaggattaaagatcaaatggtaaactatatcagtagcattgtctcttaagtatatattaggtaattcaacatctcttttgttaagtcctgtataggatacttcatgccaaccatcaacaatattactagcatactggtcagaaagccaagaagtaacacactctttgtcaaacgtatctccgatttggcaatgcctcgcaatgtctcttttcattgctgtaggatctgcaccctccaaagctccattgggtcttccagcatgctgccaaccaatataaagtgaaattgcatttaaacaaacagatttcgccaaatccaaagacgctttacgacaatcccaatttggttcttttttgtcactttcacatgcactacaaacattcattgccttttcgaccgttgacgcagaagactcaataaaggatccccaaaaggccacattagtaagtattggtttttctggattgaagtatgaatatagtgcaactagattgagatggattatatcataataaggaaatgcaccactcacaactggaaccaataatgaaaagaaagttaatggtagtactcgcatcgaatagttaatcctaaatattaattaacaaatgttaagtttaacgtagaatgaatttaggtgaaaacagataatactataaaagttattgaatgcttgcttcgttatgcatctataaagtgctcttagtggttttttttgatggtatttttggatgataattttaaaaatattaagtaggtattggttgttccctatggaagtgaaaatttatcttctttatataacaatttttcccaaaattattaaaatatagatatttttcgaagaatcttaagaataagaaaacaactaacttctccattatcaaaaattcctgtggaatattgtaggtatttcttaatcagaaaattataatatatgtaacaaaaacagtaggttcgcaaaaaggtaatatggacttcgaaaatcatcaagatctctggaaattggctaaaaaagaaatgtttaaataaacaagcaaaaattttttcccactattttataataaatacataaacatattgtccgaaataggcaatgactgtatacaataatcttatgatgaatactcaagatgtatttatcctctttcgtcccctcccgtatgttaggaccgagaatagagtaaataaaaatatacataattatatgcatcggtaactaaataatgcttatttcgaatttatctttaattccttccttcacctcttctatatatataagaaaatttttctcatccagtgaaaacatatatttttataccaagcacagaattagtatcacaaaatatgacttaaaattagctgttcctgcatgtgcattctcaattatattcttatgattattatatagttattagaatacaaattcattttccttccccatgcacaatattggagtaataatatacaaaaagtgtaaataaaatgataatttgaaattcttggtttcatatgagccatttctctctacgaacagttacatcaatgtttagtgatagttgaacgaggattattcaacagtcattgttctatctattttattttggaatattttatgttagcatatatagctttaagggaaaatgtatctgtcagtcatctgttggcctcagtattaaaaacttttttaaaattactataatattaacaagatggagtgctataaacttataataggatattgatggtattataaattcttcgtttacttataatatcaaagagatctctaattatatatcagtaaaccatattcacagcaatacgctatgataccactacaatatctcaataatcaaattcacttctattctcttctctactttatacagttaatattttaaactactatttgcaataacatatctaattttactgacatccctaggtacatgacaattgctactatcacattgtactatctactacagctatcactctttgcaatggagcaatacattcttttactatgtataatgatattttattatattccaacaagaccatctatcacatagcaaaaactataaactccttacatatacactcttgaatgattttcttggtttagatctattaattaattaaaacaagactgcttatggttgatacagaactgtaaccactaatatatgttaacgctataattgtttcaaacaaacagaatttattctactacagccactcattatacacattatatctttctgctaaactgctctcttatcattttcctttcattttatttttcctctgagatccaatttttcttaaatttcaaaaacattttcaagcaaataaaaaaacacacacagatatgaacaactgtacaatacaaacaagcatgtaaacagtatgtataaaaccaacttatggatgatcatgcatactcagttgttatctatgcacttcatatatttacataatataaatataaacatcgagctactaccattcaacatgatataatcataccatattacatctaacaatcattcatgaatatacttgatacagtcaactgagatactgttaacgaagggaatacatttatcaactttatacatatatgattactatggaatatgtttggaaatagaatacatttatctttatgatatgattattttattactatgattattttattactatgaatatttaggaatacatgaacacaaatactatctcccatctaaatgatacaatttgatatcacacattagtttcacatcgtattcacattaatgcaactatcatgaaatgtacaatctgttcatacagctaaacctcctactataattatcaacactataccaactaccagctaccatctaaccacaacaaaaataccacaattagatcactcacaaagatgtattctacaaataactaaaattatatttttttcatgaagaattattcattataactgatcgtcaataggtaaaattcaataatactgttatctatccctaccacatcaacaccatgtatcacaatgatcaacatcaattcaaataataaacatgccacaccctgtaattatattataattgaaagtaaaatggttcaagtatgggatacacaacagaatgttacttatttactgatttgtattagatctgtaggaattattttttctgggctactatatttatatacaaaggtagaacagtcattgctttaagtgttactatgaactttacactcaggttttttattttatacagtgttatctaatttacccaagaaaagaactttggataaacaattttcaaaacactatttgatacttaatacaataaaacaggagattattttctatgaaacagcaactttgaacaaacgtctaatgtttcttttgttatgtctttttttctggtcaagatcaatattgtatggtatattattgctatagatgttttttactatgagttacatgtaggtaaggtataaaatattctactatagtttttatgaataatagtgcacaacaatatagtaccactgtctgatttttcaaacatatatccattgatatatcatccatgtagatcactttccactggtatttgactaatttctgtaataaattctactacatcagtactctcctcattcaagtgtttttagttgctgttgctatttagtcaattagtgacaatgcaaaatcatctgctgctgttagaatattgcaatttacaatgatgatgtcattaaataaagaaaaataaatttggaggcatattaaatttttatgaaggttcataccaataccagtagatgccattcatgttggaaattaaacaactgttaccacatgatttatgaataatcaagtttttttatttgtacatctgtatgtattgaaatgattaaaagttgaaatgttctttgattaattaaaatttattgaatttgaaaaagataaagaatgagaaagagttaggggtatagtatatggagacctgtttgagttggtgtattacataagccagaaatgtttgacttgttagatagtaagatgttatttaggatagttgtaatgataattttggatatgttacctgatgatcaaacaaacatattaatatataaatttctattaagagtataaaagcattctaaataatgatagctttcttgattgtaatatgaataattaataatattgataacattaaaaatatcttcagtaagtaatggtagcgggtttagttattgctcatatagattatcatctctgtttatctcattatcatagtgttatattagtattaggataatcaaagagatcattttaatacaatgaactgtagtatcacaaataattctgttaaattaatacaatcaataatttactagtgagatgtttataatgtagaatataattataaatatatcattggaagaattgttaaatcatttataacagattaggtagtttgaaacatgttagttatgttcttgttctaatacttatattcatattggtaatattacagttcagatccaagatatcacacattttagagtagataacaaatcattcccagtataataattaataagttattgtacatatttagaatttgtttatattatttattatccagaatgtttaaagttgtaattcacttcaaaatttattctgctatgtctaacaaagagtaataaaattatcagatgattgggatatgagtagaataaataatattcattaacattactacaataaaattaatacatccatgtaagtttaaagattcattagttattcttgctatcatattacagtcagttgatattttgttcatatgataatcattaaacatacaataaaataataggcaatcatttcttttagactgaaggtattgaggggaagtggttgagtattcttagacaatcatatttataaaaaagtaacatcattgatagatatcttcactaatgataatatatgtattaggtaggctgtctatagcttaaaatatctcagttagttgtattgagtatagttaaatataaaaactttttttctcaaaattaactttctgaaacgtataaatagtcaagatatagaagttagaaataatttcttttacttacgactttatatacgtaatacacagttttgtaataatatatgtattatttaatactgtgagcgattacttataaaaatacggttcgtgaagttccattataacttataggttattactccacaccttttaaatttcaacagctacaaaatatgtttacattgctgttccagcttattttgaattacaaaaaattttcaaatttattaccgaagaagaaaattatgagaaagaaagaaaactattattaactttgtagaatattaaatataaaaagcaaaagccgtccatatctatgttaaataaaattttatctaatctttattttgggattagaaccctgagaatacttccttatacaactattacgattttcaaattattagttacaagttgtagaaagtactaaaaactagtaagcacttaacatagtatgtggaatattgttaagaacatgaacaatctaaacctatctgaaaacttctggcccaattatgtgaatcatgatagggtgtcttagaaaaaaaactattggaatactcttttactatataaatccttgattatttgtacaatatgaataatatacataacttatagaaatatgaaataaacactctaacactacttaatcttattcatggattatggctaccctattatattgaaattcctatggtaattattaaaaaaacaaaaaaacgagtccaacagatagtgattatgactatattttgaataataaaagactacaaatgttgctaacttcctgtgtcacacttggaccaatagatattgttaccaacggaagcaatatacatacgccatgatatttgccaatcttgagttttgtcatcctgttcatacgtgtacattttataatagtcactaacccaacttccatcaacgtcattagtcaaaatttcttctaacatattctctagttctccacttttatatattccaccccattcagattgatttgcacagtaatcaagtgccatataggcgttacataaaggtgcataaaccggatagtttgctcttttgctgagattagcattatttccgttccatatcccaacctgtgtcattgcaacagcaccagtagactcagaatgaggattaaagatcaaatggtaaactatatcagtagcattgtctcttaagtatatattaggtaattcaacatctcttttgttaagtcctgtataggatacttcatgccaaccatcaacaatattactagcatactggtcagaaagccaagaagtaacacactctttgtcaaacgtatctccgatttggcaatgcctcgcaatgtctcttttcattgctgtaggatctgcaccctccaaagctccattgggtcttccagcatgctgccaaccaatataaagtgaaattgcatttaaacaaacagatttcgccaaatccaaagacgctttacgacaatcccaatttggttcttttttgtcactttcacatgcactacaaacattcattgccttttcgaccgttgacgcagaagactcaataaaggatccccaaaaggccacattagtaagtattggtttttctggattgaagtatgaatatagtgcaactagattgagatggattatatcataataaggaaatgcaccactcacaactggaaccaataatgaaaagaaagttaatggtagtactcgcatcgaatagttaatcctaaatattaattaacaaatgttaagtttaacgtagaatgaatttaggtgaaaacagataatactataaaagttattgaatgcttgcttcgttatgcatctataaagtgctcttagtggttttttttgatggtatttttggatgataattttaaaaatattaagtaggtattggttgttccctatggaagtgaaaatttatcttctttatataacaatttttcccaaaattattaaaatatagatatttttcgaagaatcttaagaataagaaaacaactaacttctccattatcaaaaattcctgtggaatattgtaggtatttcttaatcagaaaattataatatatgtaacaaaaacagtaggttcgcaaaaaggtaatatggacttcgaaaatcatcaagatctctggaaattggctaaaaaagaaatgtttaaataaacaagcaaaaattttttcccactattttataataaatacataaacatattgtccgaaataggcaatgactgtatacaataatcttatgatgaatactcaagatgtatttatcctctttcgtcccctcccgtatgttaggaccgagaatagagtaaataaaaatatacataattatatgcatcggtaactaaataatgcttatttcgaatttatctttaattccttccttcacctcttctatatatataagaaaatttttctcatccagtgaaaacatatatttttataccaagcacagaattagtatcacaaaatatgacttaaaattagctgttcctgcatgtgcattctcaattatattcttatgattattatatagttattagaatacaaattcattttccttccccatgcacaatattggagtaataatatacaaaaagtgtaaataaaatgataatttgaaattcttggtttcatatgagccatttctctctacgaacagttacatcaatgtttagtgatagttgaacgaggattattcaacagtcattgttctatctattttattttggaatattttatgttagcatatatagctttaagggaaaatgtatctgtcagtcatctgttggcctcagtattaaaaacttttttaaaattactataatattaacaagatggagtgctataaacttataataggatattgatggtattataaattcttcgtttacttataatatcaaagagatctctaattatatatcagtaaaccatattcacagcaatacgctatgataccactacaatatctcaataatcaaattcacttctattctcttctctactttatacagttaatattttaaactactatttgcaataacatatctaattttactgacatccctaggtacatgacaattgctactatcacattgtactatctactacagctatcactctttgcaatggagcaatacattcttttactatgtataatgatattttattatattccaacaagaccatctatcacatagcaaaaactataaactccttacatatacactcttgaatgattttcttggtttagatctattaattaattaaaacaagactgcttatggttgatacagaactgtaaccactaatatatgttaacgctataattgtttcaaacaaacagaatttattctactacagccactcattatacacattatatctttctgctaaactgctctcttatcattttcctttcattttatttttcctctgagatccaatttttcttaaatttcaaaaacattttcaagcaaataaaaaaacacacacagatatgaacaactgtacaatacaaacaagcatgtaaacagtatgtataaaaccaacttatggatgatcatgcatactcagttgttatctatgcacttcatatatttacataatataaatataaacatcgagctactaccattcaacatgatataatcataccatattacatctaacaatcattcatgaatatacttgatacagtcaactgagatactgttaacgaagggaatacatttatcaactttatacatatatgattactatggaatatgtttggaaatagaatacatttatctttatgatatgattattttattactatgattattttattactatgaatatttaggaatacatgaacacaaatactatctcccatctaaatgatacaatttgatatcacacattagtttcacatcgtattcacattaatgcaactatcatgaaatgtacaatctgttcatacagctaaacctcctactataattatcaacactataccaactaccagctaccatctaaccacaacaaaaataccac

SEQ ID NO: 21 - DNA, 494062 bp, Kazachstania heterogenica
  source 1..494062: mol_type = genomic DNA
ggtgctgctgccattgtagttggtggtgtatagggtggaggtggatagaacagaagcagagccaaccatgcctggaacataggaggtgatcacagatggcattggtgtctcaacaatcacaacaccaatgtgggtgctgctgccgttgttgtcggtggtgtacatggtggaggtggagacaacagaagaagaaccaaccatgcctggaacataggaggtgatcacagatggcattggggtctcaacaatcacaacaccaatgtgggtgctgctaccgttgtagttggtggtgtacatggtggaggtggagacaacagaagaagaaccaaccatgcctggaacataggaggtgatcacagatggcattggggtctcaacaatcacaacaccaatgtgggtgctgctaccgttgtagttggtggtgtacaaggtggaggtggatagaacagaagcagaaccaaccatgcctggaacataggaagtaatgacacttggcattggggtctcaacaatcacaacaccaatgtgagtgctgctaccgttgtagttggtggtgtacatggtggaggtggacttaatagaagaagaaccaaccatgcctggaacataggaagtaatgacacttggcattggggtttcaacaatcacaacaccaatatgagtgctgctgccgttgtagttggtggtgtacagggtggaggtggatagcacagaagcagaaccaaccatgcctggaacataggaagtaatgacacttggcattggggtctcaacaatcacaacaccgatgtgagtgctgctgccgttgtagttggtggtgtacagggtggaggtggatagcacagaagcagaaccaaccatgcctggaacataggaagtaatgacacttggcattggggtctcaacaatcacaacaccgatgtgagtgctgctgccgttgtagttggtggtgtacagggtggaggtggatagcacagaagcagaaccaaccatgcctggaacataggaagtaatgacacttggcattggggtctcaacaatcacaacaccaatatgagtgctgctgccgttgtagttggtggtgtacaaggtggaggtggatagaacagaagcagaaccaaccatgcctggaacataggaagtaatgacacttggcattggggtctcaacaatcacaacaccaatatgagtgctgctgccgttgtagttggtggtgtacagggtggaggtggatagaacagaagcagaaccaaccatgcctggaacataggaagtaatgacacttggcattggggtctcaacaatcacaacaccaatgtgggtgctgctaccgttgtagttggtggtgtacaaggtggaggtggagacaacagaagaagaaccaaccatacctggaacataggaagtaatgacacttggcattggggtttcaacaatcacaacaccaatgtgggtgctgctgccgttgtagttggtggtgtatagggtggaggtggatagaacagaagcagagccaaccatgcctggaacataggaggtgatcacagatggcattggggtctcaacaatcacaacaccaatgtgggtgctgctgccgttgtagttggtggtgtacagggtggaggtggatagcacagaagcagagccaaccatgcctggaacataggaggtgatcacagatggcattggggtctcaacaatcacaacaccaatgtgggtgctgctgccgttgtagttggtggtgtacagggtggaggtggatagacacagaagcagagccaaccatgcctggaacataggaggtgatcacagatggcattggggtctcaacaatcacaacaccaatgtgggtgctgctgccgttgtagttggtggtgtacagggtggaggtggatagaacagaagaagaaccaaccatgcctggaacataggaagtaatgacacttggcattggggtctcaacaatcacaacaccaatgtgggtgctgctgccgttgtagttggtggtgtacagggtggaggtggatagaacagaagcagagccaaccatgcctggaacataggaagtaatgacacttggcattggggtctcaacaatcacaacaccaatatgagtgctgctaccgttgtagttggtggtgtacatggtggaggtggacttaatagaagaagaaccaaccatgcctggaacataggaagtaatgacacttggcattggggtctcaacaatcacaacaccaatgtgagtgctgctgccgttgtagttggtggtgtacagggtggaggtggatagaacagaagcagagccaaccatgcctggaacataggaagtaatgacacttggcattggggtctcaacaatcacaacaccaatatgagtgctgctaccgttgtagttggtggtgtacatggtggaggtggacttaatagaagaagaaccaaccatgcctggaacataggaagtaatgacacttggcattggggtttcaacaatcacaacaccaatatgagtgctgctgctgttgtagttggtggtgtacagggtggaggtggataacacagaagcagaaccaaccatgcctggaacataggaagtaatgacacttggcattggggtctcaacaatcacaacaccaatatgagtgctgctgccgttgtagttggtggtgtacagggtggaggtggatagaacagaagcagagccaaccatgcctggaacataggaagtaatgacacttggcattggggtttcaacaatcacaacaccaatatgagtgctgctgccgttgtagttggtggtgtacagggtggaggtggataacacagaagcagaaccaaccatgcctggaacataggaagtaatgacacttggcattggggtctcaacaatcacaacaccaatatgagtgctgctgccgttgtagttggtggtgtacagggtggaggtggataacacagaagcagaaccaaccatgcctggaacataggaagtaatgacacttggcattggggtctcaacaatcacaacaccaatgtgagtgctgctgccattgtagttggtggtgtacagggtggaggtggatagaacagaagcagagccaaccatgcctggaacataggaagtaatgacacttggcattggggtttcaacaatcacaacaccaatatgagtgctgctaccgttgtagttggtggtgtacatggtggaggtggacttaatagaagcagaaccaaccatgcctggaacataggaggtgatcacagatggcattggtgtctcaacaatcacaacaccaatgtgggtgctgctgccgttgtagttggtggtgtacagggtggaggtggataacacagaagcagaaccaaccatgcctggaacataggaagtaatgacacttggcattggggtctcaacaatcacaacaccaatgtgagtgctgctgccgttgtagttggtggtgtacagggtggaggtggatagaacagaagcagagccaaccatgcctggaacataggaagtaatgacacttggcattggggtttcaacaatcacaacaccaatgtgggtgctgctgccgttgtagttggtggtgtacagggtggaggtggatagaacagaagcagagccaaccatgcctggaacataggaagtaatgacacttggcattggggtctcaacaatcacaacaccaatatgagtgctgctaccgttgtagttggtggtgtacatggtggaggtggacttaatagaagaagaaccaaccatgcctggaacataggaagtaatgacacttggcattggggtttcaacaatcacaacaccaatatgagtgctgctgccgttgtagttggtggtgtacagggtggaggtggatagcacagaagcagaaccaaccatgcctggaacataggaagtaatgacacttggcattggggtttcaacaatcacaacaccaatgtgggtgctgctaccgttgtagttggtggtgtacagggtggaggtggatagaacagaagcagaaccaaccatgcctggaacataggaggtgatcacagatggcattggggtttcaacaatcacaacaccaatgtgggtgctgctgccattgtagttggtggtgtatagggtggaggtggatagaacagaagcagagccaaccatgcctggaacataggaggtgatcacagatggcattggtgtctcaacaatcacaacaccaatgtgggtgctgctgccgttgttgtcggtggtgtacatggtggaggtggagacaacagaagaagaaccaaccatgcctggaacataggaggtgatcacagatggcattggggtctcaacaatcacaacaccaatgtgggtgctgctaccgttgtagttggtggtgtacaaggtggaggtggatagcacagaagcagaaccaaccatgcctggaacataggaagtaatgacacttggcattggggtttcaacaatcacaacaccaatgtgggtgctgctgccgttgtagttggtggtgtacagggtggaggtggatagaacagaagcagagccaaccatgcctggaacataggaagtaatgacacttggcattggggtttcaacaatcacaacaccaatatgagtgctgctaccgttgtagttggtggtgtacatggtggaggtggacttaatagaagcagaaccaaccatgcctggaacataggaggtgatcacagatggcattggggtctcaacaatcacaacaccaatgtgagtgctgctgccgttgtagttggtggtgtacagggtggaggtggataacacagaagcagaaccaaccatgcctggaacataggaagtaatgacacttggcattggggtctcaacaatcacaacaccaatgtgagtgctgctgccgttgtagttggtggtgtacagggtggaggtggatagaacagaagcagagccaaccatgcctggaacataggaagtaatgacacttggcattggggtttcaacaatcacaacaccaatgtgggtgctgctgccgttgtagttggtggtgtacagggtggaggtggatagaacagaagcagagccaaccatgcctggaacataggaagtaatgacacttggcattggggtctcaacaatcacaacaccaatatgagtgctgctaccgttgtagttggtggtgtacatggtggaggtggacttaatagaagaagaaccaaccatgcctggaacataggaagtaatgacacttggcattggggtttcaacaatcacaacaccaatatgagtgctgctgccgttgtagttggtggtgtacagggtggaggtggatagcacagaagcagaaccaaccatgcctggaacataggaagtaatgacacttggcattggggtttcaacaatcacaacaccaatgtgggtgctgctaccgttgtagttggtggtgtacagggtggaggtggatagaacagaagcagaaccaaccatgcctggaacataggaggtgatcacagatggcattggggtttcaacaatcacaacaccaatgtgggtgctgctgccattgtagttggtggtgtatagggtggaggtggatagaacagaagcagagccaaccatgcctggaacataggaggtgatcacagatggcattggtgtctcaacaatcacaacaccaatgtgggtgctgctgccgttgttgtcggtggtgtacatggtggaggtggagacaacagaagaagaaccaaccatgcctggaacataggaggtgatcacagatggcattggggtctcaacaatcacaacaccaatgtgggtgctgctaccgttgtagttggtggtgtacaaggtggaggtggatagcacagaagcagaaccaaccatgcctggaacataggaagtaatgacacttggcattggggtttcaacaatcacaacaccaatgtgggtgctgctgccattgtagttggtggtgtatagggtggaggtggatagaacagaagcagagccaaccatgcctggaacataggaggtgatcacagatggcattggtgtctcaacaatcacaacaccaatgtgggtgctgctgccgttgttgtcggtggtgtacatggtggaggtggagacaacagaagaagaaccaaccatgcctggaacataggaggtgatcacagatggcattggggtctcaacaatcacaacaccaatgtgggtgctgctaccgttgtagttggtggtgtacaaggtggaggtggagacaacagaagaagaaccaaccatacctggaacataggaagtaatgacacttggcattggggtttcaacaatcacaacaccaatgtgggtgctgctaccgttgtagttggtggtgtacagggtggaggtggatagaacagaagcagaaccaaccatgcctggaacataggaagtaatgacacttggcattggggtttcaacaatcacaacaccaatgtgagtgctgctgccgttgtagttggtggtgtacagggtggaggtggatagcacagaagcagaaccaaccatgcctggaacataggaagtaatgacacttggcattggggtctcaacaatcacaacaccgatgtgagtgctgctgccgttgtagttggtggtgtacagggtggaggtggatagcacagaagcagaaccaaccatgcctggaacataggaagtaatgacacttggcattggggtttcaacaatcacaacaccaatatgagtgctgctgccgttgtagttggtggtgtacagggtggaggtggatagcacagaagcagaaccaaccatgcctggaacataggaagtaatgacacttggcattggggtctcaacaatcacaacaccgatgtgagtgctgctgccgttgtagttggtggtgtacagggtggaggtggatagcacagaagcagaaccaaccatgcctggaacataggaagtaatgacacttggcattggggtctcaacaatcacaacaccgatgtgagtgctgctgccgttgtagttggtggtgtacagggtggaggtggatagcacagaagcagaaccaaccatgcctggaacataggaagtaatgacacttggcattggggtctcaacaatcacaacaccaatatgagtgctgctgccgttgtagttggtggtgtacaaggtggaggtggacttaatagaagaagaaccaaccatgcctggaacataggaagtaatgacacttggcattggggtttcaacaatcacaacaccaatatgagtgctgctgccgttgtagttggtggtgtacagggtggaggtggataacacagaagcagaaccaaccatgcctggaacataggaagtaatgacacttggcattggggtctcaacaatcacaacaccaatgtgggtgctgctaccgttgtagttggtggtgtacaaggtggaggtggagacaacagaagaagaaccaaccatacctggaacataggaagtaatgacacttggcattggggtttcaacaatcacaacaccaatgtgggtgctgctgccgttgtagttggtggtgtatagggtggaggtggatagaacagaagcagagccaaccatgcctggaacataggaggtgatcacagatggcattggggtctcaacaatcacaacaccaatgtgggtgctgctgccgttgtagttggtggtgtacagggtggaggtggatagcacagaagcagagccaaccatgcctggaacataggaggtgatcacagatggcattggtgtctcaacaatcacaacaccaatgtgggtgctgctgccgttgtagttggtggtgtacagggtggaggtggataacacagaagcagagccaaccatgcctggaacataggaggtgatcacagatggcattggggtctcaacaatcacaacaccaatgtgggtgctgctgccgttgtagttggtggtgtacagggtggaggtggatagaacagaagaagaaccaaccatacctggaacataggaagtaatgacacttggcattggggtctcaacaatcacaacaccaatgtgggtgctgctaccgttgtagttggtggtgtacatggtggaggtggacttaatagaagaagaaccaaccatgcctggaacataggaagtaatgacacttggcattggggtctcaacaatcacaacaccaatgtgagtgctgctgccgttgtagttggtggtgtacagggtggaggtggatagaacagaagcagagccaaccatgcctggaacataggaagtaatgacacttggcattggggtctcaacaatcacaacaccaatatgagtgctgctaccgttgtagttggtggtgtacatggtggaggtggacttaatagaagaagaaccaaccatgcctggaacataggaagtaatgacacttggcattggggtttcaacaatcacaacaccaatatgagtgctgctgctgttgtagttggtggtgtacagggtggaggtggataacacagaagcagaaccaaccatgcctggaacataggaagtaatgacacttggcattggggtctcaacaatcacaacaccaatatgagtgctgctgccgttgtagttggtggtgtacagggtggaggtggatagaacagaagaagaaccaaccatacctggaacataggaagtaatgacacttggcattggggtctcaacaatcacaacaccaatgtgggtgctgctgccgttgtagttggtggtgtacagggtggaggtggatagaacagaagcagaaccaaccatgcctggaacataggaggtgatcacagatggcattggggtctcaacaatcacaacaccaatgtgggtgctgctgccgttgtagttggtggtgtacagggtggaggtggatagaacagaagcagaaccaaccatgcctggaacataggaagtaatgacacttggcattggggtctcaacaatcacaacaccaatgtgagtgctgctgccgttgtagttggtggtgtacagggtggaggtggatagaacagaagcagagccaaccatgcctggaacataggaagtaatgacacttggcattggggtttcaacaatcacaacaccaatatgagtgctgctaccgttgtagttggtggtgtacatggtggaggtggacttaatagaagcagaaccaaccatgcctggaacataggaggtgatcacagatggcattggtgtctcaacaatcacaacaccaatgtgggtgctgctgccgttgtagttggtggtgtacagggtggaggtggataacacagaagcagaaccaaccatgcctggaacataggaagtaatgacacttggcattggggtctcaacaatcacaacaccaatgtgagtgctgctgccgttgtagttggtggtgtacagggtggaggtggatagaacagaagcagagccaaccatgcctggaacataggaagtaatgacacttggcattggggtttcaacaatcacaacaccaatgtgggtgctgctgccgttgtagttggtggtgtacagggtggaggtggatagaacagaagcagagccaaccatgcctggaacataggaagtaatgacacttggcattggggtctcaacaatcacaacaccaatatgagtgctgctaccgttgtagttggtggtgtacatggtggaggtggacttaatagaagaagaaccaaccatgcctggaacataggaagtaatgacacttggcattggggtttcaacaatcacaacaccaatatgagtgctgctgccgttgtagttggtggtgtacagggtggaggtggatagcacagaagcagaaccaaccatgcctggaacataggaagtaatgacacttggcattggggtttcaacaatcacaacaccaatgtgggtgctgctaccgttgtagttggtggtgtacagggtggaggtggatagaacagaagcagaaccaaccatgcctggaacataggaggtgatcacagatggcattggggtttcaacaatcacaacaccaatgtgggtgctgctgccattgtagttggtggtgtatagggtggaggtggatagaacagaagcagagccaaccatgcctggaacataggaggtgatcacagatggcattggtgtctcaacaatcacaacaccaatgtgggtgctgctgccgttgttgtcggtggtgtacatggtggaggtggagacaacagaagaagaaccaaccatgcctggaacataggaggtgatcacagatggcattggggtctcaacaatcacaacaccaatgtgggtgctgctaccgttgtagttggtggtgtacaaggtggaggtggatagcacagaagcagaaccaaccatgcctggaacataggaagtaatgacacttggcattggggtttcaacaatcacaacaccaatgtgggtgctgctgccgttgtagttggtggtgtacagggtggaggtggatagaacagaagcagagccaaccatgcctggaacataggaggtgatcacagatggcattggggtctcaacaatcacaacaccaatgtgggtgctgctgccgttgttgtcggtggtgtacatggtggaggtggagacaacagaagaagaaccaaccatgcctggaacataggaggtgatcacagatggcattggggtctcaacaatcacaacaccaatgtgggtgctgctaccgttgtagttggtggtgtacaaggtggaggtggatagcaacagaagcagaaccaaccatgcctggaacataggaagtaatgacacttggcattggggtttcaacaatcacaacaccaatgtgggtgctgctgccgttgtagttggtggtgtacagggtggaggtggatagcacagaagcagaaccaaccatgcctggaacataggaagtaatgacacttggcattggggtctcaacaatcacaacaccgatgtgagtgctgctgccgttgtagttggtggtgtacagggtggaggtggatagcacagaagcagaaccaaccatgcctggaacataggaagtaatgacacttggcattggggtctcaacaatcacaacaccgatgtgagtgctgctgccgttgtagttggtggtgtacagggtggaggtggatagcacagaagcagaaccaaccatgcctggaacataggaagtaatgacacttggcattggggtctcaacaatcacaacaccaatatgagtgctgctgccgttgtagttggtggtgtacagggtggaggtggatagcacagaagcagaaccaaccatgcctggaacataggaggtgatcacagatggcattggggtctcaacaatcacaacaccaatgtgggtgctgctgccgttgtagttggtggtgtacagggtggaggtggatagaacagaagcagaaccaaccatgcctggaacataggaagtaatgacacttggcattggggtctcaacaatcacaacaccaatgtgggtgctgctgccgttgtagttggtggtgtacagggtggaggtggatagaacagaagcagaaccaaccatgcctggaacataggaggtgatcacagatggcattggggtctcaacaatcacaacaccaatgtgggtgctgctgccgttgtagttggtggtgtacagggtggaggtggatagaacagaagcagaaccaaccatgcctggaacataggaagtaatgacacttggcattggggtctcaacaatcacaacaccaatgtgggtgctgctgccgttgtagttggtggtgtacagggtggaggtggatagaacagaagcagaaccaaccatgcctggaacataggaggtgatcacagatggcattggggtctcaacaatcacaacaccaatgtgagtgctgctgccgttgtagttggtggtgtacagggtggaggtggatagaacagaagcagaaccaaccatgcctggaacataggaagtaatgacacttggcattggggtttcaacaatcacaacaccaatatgagtgctgctgccgttgtagttggtggtgtacaaggtggaggtggatagcacagaagcagaaccaaccatgcctggaacataggaggtgatcacagatggcattggggtctcaacaatcacaacaccaatgtgggtgctgctgccgttgtagttggtggtgtacagggtggaggtggatagcacagaagcagaaccaaccatgcctggaacataggaagtaatgacacttggcattggggtctcaacaatcacaacaccaatgtgggtgctgctgccgttgtagttggtggtgtacagggtggaggtggatagaacagaagcagaaccaaccatgcctggaacataggaagtaatgacacttggcattggggtctcaacaatcacaacaccgatgtgagtgctgctgccgttgtagttggtggtgtacagggtggaggtggatagaacagaagcagaaccaaccatgcctggaacataggaagtaatgacacttggcattggggtctcaacaatcacaacaccaatgtgggtgctgctgccgttgtagttggtggtgtacagggtggaggtggataacacagaagcagaaccaaccatgcctggaacataggaggtgatcacagatggcattggggtttcaacaatcacaacaccaatatgagtgctgctgccgttgtagttggtggtgtacagggtggaggtggatagcacagaagcagaaccaaccatgcctggaacataggaggtgatcacagatggcattggggtttcaacaatcacaacaccaatgtgggtgctgctgccgttgtagttggtggtgtacagggtggaggtggatagcacagaagcagaaccaaccatgcctggaacataggaagtaatgacacttggcattggggtctcaacaatcacaacaccgatgtgagtgctgctgccgttgtagttggtggtgtacagggtggaggtggatagcacagaagcagaaccaaccatgcctggaacataggaagtaatgacacttggcattggggtctcaacaatcacaacaccaatatgagtgctgctgccgttgtagttggtggtgtacagggtggaggtggatagcacagaagcagaaccaaccatgcctggaacataggaggtgatcacagatggcattggggtctcaacaatcacaacaccaatgtgagtgctgctgccgttgtagttggtggtgtacagggtggaggtggatagaacagaagcagagccaaccatgcctggaacataggaagtaatgacacttggcattggggtctcaacaatcacaacaccaatatgagtgctgctaccgttgtagttggtggtgtacaaggtggaggtggacttaatagaagaagaaccaaccatgcctggaacataggaagtaatgacacttggcattggggtctcaacaatcacaacaccaatatgagtgctgctgccgttgtagttggtggtgtacagggtggaggtggatagaacagaagcagagccaaccatgcctggaacataggaagtaatgacacttggcattggggtttcaacaatcacaacaccaatatgagtgctgctgccattgtagttggtagtgtacagggtggaggtggatagcacagaagcagaaccaaccatgcctggaacataggaagtaatgacacttggcattggggtctcaacaatcacaacaccaatatgagtgctgctgctgttgtagttggtggtgtacagggtggaggtggatagcacagaagcagaaccaaccatgcctggaacataggaagtaatgacacttggcattggggtttcaacaatcacaacaccaatgtgggtgctgctgccgttgtagttggtggtgtacaaggtggaggtggatagcacagaagcagaaccaaccatgcctggaacataggaggtgatcacagatggcattggggtctcaacaatcacaacaccaatatgagtgctgctgccgttgtagttggtggtgtacaaggtggaggtggatagcacagaagcagaaccaaccatgcctggaacataggaggtgatcacagatggcattggggtctcaacaatcacaacaccaatgtgggtgctgctgccgttgtagttggtggtgtacagggtggaggtggatagcacagaagcagaaccaaccatgcctggaacataggaagtaatgacacttggcattggggtctcaacaatcacaacaccaatgtgagtgctgctgccgttgtagttggtggtgtacagggtggaggtggatagcacagaagcagaaccaaccatgcctggaacataggaagtaatgacacttggcattggggtttcaacaatcacaacaccaatatgagtgctgctgccgttgtagttggtggtgtacagggtggaggtggatagcacagaagcagaaccaaccatgcctggaacataggaggtgatcacagatggcattggggtctcaacaatcacaacaccaatgtgggtgctgctgccgttgtagttggtggtgtacaaggtggaggtggatagaacagaagcagagccaaccatgcctggaacataggaggtgatcacagatggcattggggtctcaacaatcacaacaccaatgtgggtgctgctgccgttgtagttggtggtgtacaaggtggaggtggatagcacagaagcagaaccaaccatgcctggaacataggaggtgatcatgcttggagcatgcgagatcagagcggttggcattggtgtttctacaatcacaatgtcaatgtgggtgctgctacccttggagttcgtagtgtaagatgtgagggtgaagagaacatcagtcgaatcaatcatacctgcaacgaatgatgtaattacacttgccattggggtcttaacgcttacatcgtccattggagtgctgctacccctggggttggtggtggagtcatcagaggcagatccaatcatcgttggagcatgtgagatcatagcagttggcattggagtctcaacaattactatgtcaattggagtgctgctacccttggagttggtggtgtaggaggtgagggtgaaaagaacagtggttgaatcaaccatgcctgcaacgaacgatgtgaccgcacttggtattggagtggccactacaacaacaacttctggagatgaagaaccgttactgtcagtgacgatagtagtataggtggttgtggttggggcagaaatgcttgcagcagtagtagtgtaggaggtggatggcgatggggtgatcacaacaacaacaacctctggagaagataagccatcgtagttaacggctgtagtataggtggttgtggttggagctgtgacatctgcagtagtagtggtgtaggaggtagatggcgatggggtgatcactttcacaacaacctctggagaggaagagccattgctatcagtgacagtggttgtgtaggtggttgtagttaaagctgtgacatctgcagtagtagtagtataggaggtggatggagtcggggtgatcactaccacaacaacctctggagaagatgcaccgaaattgtccataactgtggttgtgtaagtagatgtaattggaactttgacatctgcggtagtcgtagtgtaggaggtggctacagctggggtgatcactaccacaacaacttcctcagatgaagagccattgctatcagtggtaatagtggtgtaagtagtggttgttaggaaaaaaactggagcagaagtggtagtgtaggtggtagatggtggtggatcaatcaccactatgacagcctcattaaactctccggtacgttcataattattgttgtagttagtgactctagtataataggtggttgtagttcgagctttgacatctgcagtagtagtggtgtataatgtggctggccacggaccatacgagaacgtgacccacattatagatgtcacaccgttattctggtagttgtcctgtgccattgcagcgccacccactggaagtcccaagtatgtaacagttgttgttcgcattggctcgtcaataactgtaatgatgtttacctgcgcgtcgtccttattgaaccaatctgtcgtagtgatggtggtaacagtgctaggtgtaggcaaatctcgtctataagcttgaacagtcataccgtactgagtattgaaaatggttgtataaggatgactaacggtaagtgcagaacaaaactcctcccgatcctcttcatcttccgcgtacgagtatatagcatcaccgaaatcagtgacaatcataccaccaggtagatggatagccactttaaggatacctctttgtttcacgttagtataaacagctttaaatggataggaatacccagcctccagatacaccttatgaccacctccccctaacctaccaccttcacccgaagtaagtctgaatataggatcattagcatcggagaaggatgatgttcggttacagcaatcaaaggccgaaccagcaccaaagaaaaaagcggcataatcgtccacttctagggacatagtgtaaataccagtaaatggggcaacaaagtaaccagtggccaccatcgtaaagtgtgtgataggcactcccgtataaccatatgggggcacagttgcaggccaaccggaatcccagttaagatttgtgacacctttgatttcaccaacataaggaaatttcttataaccactgatgggaaagtctggattattgatatctacaatatcatcaagcatatattcgtagaattggacggtagcacctggctggattatttttccagtaaggcatgcttttggggtgatattaccagcgaacgaaacatgaaaaaccgtaaaaagcaacagaatggagagaaactttctagtgattgaacgtatatcactgtgcattttgaatgaatgaatgtcttgggttgtagagaaaaagatttgtgtactttttccctgggttgagcaaagatactttaagagacttattacttgatcaaacttttaattttacctgtgtttaatgctcttggagctgtggtgttttattcatagcaagaaggaagtaaagggaaacaaattacgaaaagaagagatgaccaaatcatatagtatttatttttatatctttagaaatatgaacaatctaacaaaaaaacatcaagacatttataaaaaaacttgtagattgaattaaaagtattgttctcttggtcataataaacaataaaagacaaatatttttacaaaaaactatgataacggttgataacaattaaaatccttgagatcaaggagacatgtctttgttgagatgaaaataaaaaaaagaagcaaaagagcttagtaataaacaaattcagggaaaagcacttgatgtttacgattcttggtcattaaaaatgtttattggtaaaaaatgctttataataagataagagaacttacatcaactctttgctaaaaaaaccaatggaaaaaaggacaaatacgcaatgcatgtcctattgtcgcacaagaatatcccgatttgtataagatttgtccaacagttctgaaggaactgtaaaaaaacactttcaaagttagctttttctggaatttttttttctactctggaaataatagaaataaaacagtattttcggtaaatacagtgagagaattaaaaatgtcttttcctgttaagacacacaaaaaaagaaaggaaaggaaaaggggtaaacgcaaaaatagagtttcaaaaaagtgcttttatcttcaatagttttccaaagacttaccaaggagcagcgcaacaaataatagtataatagaataaaataagacaacaaataataaaagaataaaaacgatggtaacaatgaaagaaaatagtaccagtaagtgttgcccaaaaaaattgatagatctctcttacgtgttgcatatacataatatcggcaaataactttagaagaatagattatttttggaatattagatggaacaatgttatttgtagaaaaacataagatgtgagattgaatagtgagattttttgacctattgagaattattttcctacagtgtatgtatttttaataaaataataaaagcaagattactattttaaaattgtaaccttcaaaaatttttgaacatccataaaaatatgtctttcaagaaaaaaatttggaaaataaaacaagaagtttcaaatcttttgtttttgactttctttttcttatttgtctgttttaaatttcctttctagtatatcccccaccccaacaaacttggaaaaacaaaagaactgatcatattatgatctgaaaatttatagtaaaaaagtcgtttttaaaagagtagatgttgctttttttggggattttttttgtttttgttttaaaaaaatttttcaatgttccgtgaatgatatcatccagaggtagacaaaagttatgcacggtttatttgatgccatatgtattgttctttttattaaagattttgatcgttccctaaaaccggttcatatgattattgaatacaaaagcatcttttaattgaggtataataatatcgtactattttttactattaacatgcgtttacaaccaattagcacggcacagttgtgtattggaacaactaaactagagtttaaaaaaactggattttttgtattgaatttaggtgatgaaaaattttttatcatggaactattgttatatcaatatgtctggtgatgtcaagtatcagtatcaaacactttgatcttatttattacaagctaatagaacaaaataatagaaaatagcaataagacattaacgatattataggttatcagctatttattgaatgttattggtactataaatatatcttattattgtgcatgtccttttgttttacacaatgatcatacaagatatatcaatatgcagtgtaactttttttgccttagattcctcttttctacatgtttttataaatttgtgtttatgtactactataaatttacattatcaaagatatctataattacaactcaataataaaaattaagaggtgttgccttaatttctcatattgttaaaaataacatatcggtaatttactcccgataccaacaattaccacatttctttttcatcttagaattactctggccattacctgctcttactttacttcttctaccattcaaacttttttcaacatcttgttttcattattactacagtcacccttgaaaatccctagatacttctttcttagggcttatcatattttccatatttctagttttttcattcttttaatttttctttacaatactttattaaggtattatactgtttcatttatctaccattctcccttttttacacatatgatactcacaccacatcttactaagaagtactaattgaactcctaaaatacatagtctgcaggtaacgttgaatcttaaggcaaaggacttggaacagttaaaagactaggtacaggctgtgaatgtattcgaacgagcaatcgttggactaatgttggtggcaaataacttgaaaacttatttaagaagccgtcgattactgagagtcctctggatgaataatattagtacacatgtctttaacgtcggtgatcatattatatgttattattatgttaacatgtagagttattttccctcgatcttttatttggggattaatagttatattgttagaacacagatagtacgtctattaggtttccttattaaagactgttttattatgttgttaataataatcaaaagagaaaaattttaagaaaaaaaaattttaagaaaaaaaaattttaagaaaagaatcaaaagagagaccattttatatttgtttataacatattatgtaattatatacattagttttttaggtttttaataaaccagagatccaatttactaatacgttaggtcatgactgtatcaaatacaaacactactactttctatgatatataaatataaaagaagcatacaatataacgtaatttatccagattggaaaattaataactaaagtcatctacttatatgtgtttaccttttagaagtttttcataatatgttgatttattttcattctgtgtggtcttatctccctaatattgattgtgcaaaacaaacatttttcctctttgatatatttacatgtttctcatgccactaatacatcatttcagcaataaatctacaaaatgcttaagctggatattttttggttacttctgactatatttatttttttaaggacaactaatgaaaaaactcagaagattaaaacaatatttttgcccacaatattatttagtaaatataggattatggaattaattgttcagaaaaaatgtaagtctaaggagttattatcaagtttattatctaagcaaaaagaattttaaagaacatgccatattgagtatacgattatttgagtccccactgtttcttaacatttttgttgaggaaaaagagttaacaattaattttctttatattgtatacaatatatgcaaagatatggtctattattccaaatttttgtgttgaatatgaagatggtacaaaaagtttcactctatgttgttttatttttgaaacaaaaaaaaatcacccttcttacagcgtattaaaaaacaagacaagattttgaagacctaataataatgaataacttagttcctacacaaataatcgcacataaatgaaatatcttaagaacacttacataacttatcaattaatgaatggacaattactccaaattcttaaataaaagttgtaatttgtgactagttggctgtttttttatagtcaatttggtttattcattttatagttcttacttgaatatatattctttttcaaaattattacctgtacatattgaaataaagtatgcacctacccaattctaactattttgtagttaaaaatgtgaaaaaattaacgtaaggctcttcctctatctactttcaacctagtgcttgaacagtattacagaacaacataaataaaataaaaatattgtacaaagaatgtcttgcctttagatacataaatattgagtagtctttttttgtgaacaacaaaaaatatccaactactgcatggtaaatactcatacaataaataaggcatgaaatatatataaatttttatttatttttaaacaaaatacaaggggagataatatatacgtaatagttatcagcttccattgtaactagtaatcgaattaaatctataagaaacacgcctacattttcattttggttttcttaaaaacaatgtcaggcactaaaagtatctatttttagggtaaaagcaccatatcttttcttaaaccctactttattttcatctaataaatgagaattttcgaaaatattaactcaaagagctcgacaatcgtataagaaaaaacaatagaaggcacaactattctataccacaccagtttggaattgttaaaatataatatatagccaactgtacaaatggaaaaaagaacatagatcttattgtcactctagttccatgttagagtatcatggattttttttcctgtgtattggcaaaatacatgagatataactgaatatccgtctctaaatttccacagtatataaactggtctttattaatttgtttcatttatttttaacaaattttgtaaatctctttttttatcatacttgttcttatttctttctcacctaaatatctacaaatagaaattaacaaaaaataataatataaatttatctaaagtcaaataatatgaaatattacctgtttgatattattaaaacgcacacaccaattgtgtggtccttagtgggattgcatgtaaccaaaagaagtgttgctgttaccgtcctagataccaaatttactatagttccaactggttcttttattaacacaggtaccattgtcaatgaaacagctgataaaggcagtatcatgaataggttcctatagcttggtattataacgaataatggtgtcatcaataaccaataaattctatggcatatctactaggttaaatttaaaggtattatcttcaataattttctcatggataaagacaaagtaactggtaagaagagtgtttatctaattaattcaaaggctatgccaaatttatttacagttaaaaatcatatcagatctattttcatacaaataaccaggacttagatactattgaaaaaattttttagcaaatagctgtactttcattatgttctagctagactacttttacaagattagcctattctctatactattaagcttgtcaatagcgacagctctttattatcagaatactgaaattattgtactgattactttagttccatccgctttgtataccaccaccactggtaatatctctactttaaccacaattacatcaatttatgcttccacactaatacgaaaatgaatctttttcagtagatattgttgttattgttgtcactccatctctctctagcaccaacaccattcactattagtggaaagttcactaacaatgagaactaaccaacacctagctgttgcaaagcatcatttgcggttgttattagatctacaagaagtaatatacacatcacagaatatagccggtattgttgttattattcctgtttctagtttgttaaattggatactattggttactaaagtagtttgaacattgccctttgttaacccaaaacagtagtaatatatgatatattgttgctagatgttggttggttttcattgttagtggatattttaactatagccacggtgtagatgatagattaagacggagtaacaacaacaacaataacattgactggtaaagatttgttgttgtctgtaactgtagtagtctagattaatatagttgtgagtactccaacttcattaagaatctttaaggattcagaaatttttgtgtcatatctaacatacaggaaatctacaattttttgtaaaaaaaactgaaactgcttaaggtgacacttcaacggttttaagttcagtagtttgcaaagttacaaaaaccataatttattttctagaactacctagaaattccataacaattgtgattatcattattgaatgtaatggtgttgaacctgtttataataaaaaataggaccaaaaagaagaaatcaacttatttttacagaacacctatgtctttaatcagtgaactcattagatttataattcatatatgtcgttcttttttgtttgtatatagtatatgttagaacatagacagtatgtctattaggtttccttattaaagactgttttattatatcgttaataataataattgaaagagaaaaatatttttcaagaagaaaaattttaagaaaaaaaattttaagaaaagaatcaaaagaagagagatcattttgtatttgtttataacatattatataattatatacattactttaatatgtttttaataaaccagagatccaatttactaataagttaagtcatgactgtattaaatacaaacaccactactttccaagaaataaaacgcgatgtcatacagtaaacaatatgctacaactccaaacaaccagtgtctcatctttagtcataaaaaatatttcttactaatatactaaatactgttttttatatgatagtactctggtattaactggtttgaactcgaatagaacattatgaaatcgctatactgatgttttttatcatataaatttcgcgaatcctcattaacttttactttaaactctatttggactacaacaaaaatatcttttatagatatttctgctggaatgatatattactggtttgagaaacatgtaattatatcaaagaagaaaaatgtttgttttgcacaatcaatattacagagacaagatcaaacagaatcaaaataaattaatatattatgaaaaattgccaaaaggtaaacacatataagtagacgactttacttattaattttgcaacctggataaattacgttatattgtatgcttcttttacatttatataattattaattccaaaataagagatcgaggggaaattactctacatattgacatcacaatgacatataatatgatcaccaacgctaaacacatgtatactaatattattcatccaaaagaaacacaatcctgtttaatacatgtattggttctatccaaatattatgaagatgcagtagcaattcttattaatcaacactatctgcatgacgaattttcagtaaccaaaacacaacttggcattattgtaattttctgaaaaacagaatgaagaatttttatatctccagaaaagtaacatctacacttgtaatgtgaattcaaattggtggtgctatattaaaataaaaaaattggaagtattagaaaaaattgaaatttctttgaaaatttttcttatctattattgtttatatttagctaactcaaatttttcctttttttcatgaaagatttttttgtttgtacgttccagtaaaacagaaaaacatcctcttgtcatgtaaacacacattcagaccaattaccacagaaacctcatttcacttttcaattattctgtaataacaaaagcaaagaaaatttttgacaaaagtaaaaatacttaattccaatttctaaccggttaaattttgtctacatttggacaaatttttgtctgattgtttaacttttttagaatgaaaaactacaacaagtttgattgttcaactcttcttctatcaaacgagggattgaatatagttttgcaactcaacaaagaaactaattttctgcttgaacccatatcaagatgaattaattatattttcctgttttaatatgaatatagtaagtaagtagaaaaaacaagttattatcttctttaagaaggttattcttcagtatttatctaatctatagcatttatttgttggaatgtactttgtttaattccacgagcaaaatgaccaacaaagtttatttctttttttagttagcaaccgtcctagagtgattgttgttattttttgtcccaaggacttgtgttaggttttattttttaaattgtaagtcaattctttacaaaagccatagaactttagggttgtttttaaattgtcatttttagacatattacgaaacttaggaataaaaatacctcatttcagttactaacagaaatattcctaaatactagtacaagaagatgctttggacaacaataaatcccataatctaaaaataaaaaacatgcctaaaaatagttcattgtatactatctattatagtcatttcattcaaccaccaattggcaaacaaaaaacaaaaagaaatgctctgttatcaagtcttgctactttaaaaagatacaaactttttatcaccctttgacctagtataaataaacaacatcataacaataggtcgaatataataataatcatctttttttcttgtttgtcttaaaattaaaccaaatagctatcattaaacgacattgtaaaagattttaaggattccacaaggtatacgtcattttttctagttcaatagtactcttgcatgtcttacctattgtgtatccgaaaaggagaaaaaaatactccactcaaatggagaatattgaattttacaaattatattgttcttatactagatcggaaaaaagagaaaaaatcaggaataggaatatcacagtaaaaagtctaattgagacccaaatctgccaggagaataatcatattttagatctctatcataatagatgctctaatagaacagtaataactttaaataataaattcttggttaacaaaagaacaattttactacatttgttgaatattataaaaaatattactacatgctaacgtcatataaggtgctgattcttgcaatacgaactaaaaaaagaaaaaaaattgttgatggttcttatagtatataactttatataacttatgtataaacagtaacaatgcaataaaaattctttacccctttttttaaattatacattcctatttgatcccacggtcactaccaaaaattttaatatcctattgtgaatgaagtaataaattttggacattctatagatcgatttactatagaatattgtgatatatacaaaaaagagatataaatgccaaataactaattaatcaggggcgatgatcctgtaagagtggggattctctaaaataattcaggagcaaaaattcaaaaatagaacacaaagagacaggtatatctatagtgtggttagaattgtctgtattgtctcttttcccacttgtgtattttttttcttcacttttattctttttgtcgttgcatcaaatacaaagacaattgtttccaacacaatagcaaaaaggaaaaaaactatttgtccattcttaaacttgtaaactttcccttttatgttcttcaaaagtaaaatatctagacaaaaatgattctattgttctgcaacgtgaaaatgcctaaacaataaacaatatttttaattctctatttggaaatgtttttgagaactcaatattttctgtttcctttttcgtttaaagaaatcaccacacactgattttttcctattagacataacagaataattgactacgctgtgtttttatgctttacttggatttttagtccaattgttgaagattacaaatctttttcttcattctttgtttctactcctttacacacttttattattgaagatttatggtaaaactttatttgtattttattcttgttcagtcaaaaaatcagaacctattagacaatcatttttattgtaagtcatgagcacatttttatataaaactactatggattatgtctgaatattctttcgtttcttgcttctcttcttgcaggcatgagcatcatctcgttatactcccagatgctaccagtataacagaactaagtatatcacctcaaataactaaaaaaaactaacgccataaagtctacgcaccaagctatatattttactgaaaagtcaataattccaaatatttgaaaataatataatggtctcaagtgccttatcattgtgcgcggcactgcttttagctgctttttctgctgtgtcgaaggcgcaaataggttatactactatttatgttagttcgttcagtcctttaccttatgttaatccacattctggagctccgggtcctattgtaacagtggacggaataccttttaatgatccgtataatgcatctagggatgctaagtgtttgttgtccccagaacaacaggctgctgttcttctcgaacacaatttgtacagatctatatttgtcgatactcctaatgtgacctggaatgatgagttagcccaacgagcagcgtggtgggtttgcagtggtcgttggaagtctcatccagacgttccacaatggggctacattgttggctcaaacgcatactggggaaatggtcctccagtcgctggtgtaaccgcctggtttgatgaaattggtttgtataattacaacgatccttactcggtcgatagcgatgaggctggacattttacacaacttgtctggaaaggtaccacggagattggttgtgctacactagagtatgctccctatatgtatgttttagtgtgtcagtacttgcctgctggtaatatagttggtgaataccatgaaaatatcatgcctctgaaaccagcttataaaggtgttaatcgtgatcccgctacacttccctgggcaatcctatctctagaaggaccacctaggactcaacccgcagttaccttatctgtgacatcaaatcctaaccctgtttacacaatacctcctggagagtggtcagacttctttccatcaacagcccagtttacttatttaagtgccactgacagtttaactaccactgcaacaacatccacctcaaacagtaatggttctgctattgatgctaccgacagatcaaccatcacttctaaaaaatttacctcaagcaacagtcgtggttctactatggatactactgacagatcaaccaccacttctaaaaaatctgcctcaatcagtcatagttctactatagataccactgacagtttaaccatcactgcaacaacatctacctcaagcaacagtcgtagttctagtatcaatgctactgacaaatcaactgtcacttctaaaaaatctacctcaatcagtcatagttctgctatggatgccactaacagatcaactgccactgcaacgacatctacttcaagcaacagtaatggttctgctatggatgccactggcagatcaaccattacttccaagagatctacttcaagcaacaatcgtagttctagtgtcaatgctactgacagatcaacctccacttctaagaaatctaactcaagcaacagtcgtggttctactatgaataccactgacagatcaactaccacttctaacaaatctacctcaatcagtcatagttctgctatggatgctactcacagaccaatcatcatttctaagaaatctacttcaaacagtaatggttctactattgatgctactgacagatcaatcatcacttccaagagatctacctctagcaacagtaatggttctgctatgaataatactgacagatcaaccactacttctaaaaactctgcctcaatcagtcatagttctgctatggatactactgacagatcaaccatcacttctaaaaactctgcctcaatcagtcatagttctactattgatgctactgacagatcaacctccacttctaaaaaatctacctcaatcagtcatggttctactatggatgctactgacagatccactgctacttctaacaaatccacctcaagcaacagtcgtggttctactatgaataccactgacagatcaactaccacttctaacaaatctacctcaatcagtcatagttctactatagataccactgacagtttaaccatcactgcaacaacatctacctcaagcaacagtcgtagttctagtatcaatgctactgacagatcaactaccacttctaacaaatctacctcaaacaacagtcatggttctagtatagatgccactgacagatcaatcatcacttctaaaaaatctacctcaatcagtcatagttctactattgatgccactgacagatcaaccactacttctaagaaatctacttcaaacagtcatgcttctactatggatgctactaacagatcaaccatcacttccaagagatctacctctagcaacagtaatggttctgctatgaataatactgacagatcaaccactacttctaacaaatctacttcaagcaaaagtaatggttctaatatcaatgctactaatagatctaccaccacttctaacaaatctacttcaagtaacagtaatggttctactatggatgctactgacagatcaaccatcacttctagtaaatctacctctagcaatagtaatggttctgctattgatgccactgacagatcaacctccacttctgaaaaatctacttcaagcaatagtaatggttctggtattgatgctactgacagtttaactaccactgcaacaacatctacttcaaccaacactcatggttctgctattggtgccagtagtaagacacatgctgctggtgaagctgcatctgctaaaacaaatgttgctcactccgtcacaaccgctattgttgagagcacacgcatggtagatgtcactgaatgtccaatttgctcactatccaccgctaccacttcgttttcttcccaaaacggtcaaactgtcctacatggtgaaccagtgttgagagttagtacagtttatactacagacggtgttgttatcactacatacactccttcatgtccagaaagtgctaagacatgttctgttacagcttctgctgctactgctactgcaccttcagacgtaagcatggaatctgcccattccaatgttgttccatctgtaggtgttgctacttcttcttctaattctgcggaaagtgttacagttgcaaaatatgaaggtttggcagctagtttgacctcagatgttctattcagcgctattttaatggctcttattcatttgatctaattatgatactgttttagagaggcatttgaacttgtactaataattgacagacgctgtaatatatcatttattgtgattgtctgatgttagtataaaaaaattacagcacctgtttattattagtacaagtacaaatgcctctcttttttatactaagctcggttttatttatttactttttgtataaaatatttttttttaaatataatttatttacagaacacttttagttggtctaatttatttttacttaataatattgaatcttgtcctactacgatcatgaccttagtagttcttttctttacctaaaaagcatgactacaggggttgtataagttattgaccttcttaaatacaactttatgcgtctcaaggacgatatttttttttccatttcagttgtgaaggatacgtcactatctatatggaatccttcaatgctatcgtagagaccaaatatctgaagatcctactgaaatatatcaatgatcatatttgatactctaaagagacaatataaaacaatcaaactactccaatagatgtaaaaatgaaaagatctgtatctttgaatcaaatactgaatgggaaccctatatctaagagaactaagctgaatgggagtaaagtaaaaggaatatcgaaagacccagagactgtcgaccttgtgaaactacctgagcaggtagacctcaataacgttcaaacaaataaaccaaaaattattccacttggtgataatctatccagcgtcttggtgaagacatttctaatgaggaaaccaccaaagttactaaatattataggaatgtacttcctgggagtataattaattattaatctaatggtagtgtatattttaagtaagattgccaatatagcaagtaacaaatacacaccactgattattaacagcttattgtaaatctaactacatattataagaatccaacttttagttatgatgtattgtgtgaaataaataatatcaaactgtcattatatatacttgaaatgtttacatctaattatatcctaagacttaataaaatatacaaaataatagaaatataatatacacccattagtttttaatatttcactttgtattatcttttccaaaaactatgtcattaaatattattcatttgtaagtattaatagtattatgtgaaaaattttggatgttgtaatatataaattatttaaacgcattaataaaggttggatttcatatttatttaatggtgaactaataaattttagaattctatttattatgatatagcaataaatattctagatatatataatattataaccataggtaagaaaagtctctctgttattttatttgtaaaataatatccactagcttttgccttattttctttttatttaattattagtatacttatcaaaactgttgaataataggcagataatcactacttttttatttaaaagtgatttttgtagatcattaaaacaactttttgaagaaaatatttcaagaaaaagaaatagtgaaggatcaatgtgtgtttgtttataaacaccatatatattttctgcatagtttttaataaaatggagatccaatttgtctaaggctcaagtaatagaaatgttagatataaaattcattattgtctaagataaaccaactatcttcaatactactgtgctaatcatcaattctatcatatgtgttaaaatataactccacataagttattgtctctatggaacctgatttaagtttaacttgctaaagttagcatcaatacaacactgccaatctttatcatttatcaaaatatttcagttgcaatagatgctaaagcctagaaattatttgcattcacttatttggcatttttaactataataacgtagtcgaatttaagattgcataatttcattgtaaatagtagttttgttttcaaatcttgcaatttcctttttgacatttatgcaactggcacaaatatgttgttttacactacttttgtgcatgacatcttgcctgttgttgtttggaacaaacattgagaaattttcctttaaatgatcacataatagtaaaatagaaatatctcactcacatgaaattttctacttgctttcatcgtaaaatgggctaatagatgtttccaaataagcagagacaattatgatactataaacgttttaattatgaattttaattgtgatttgacatcaagggggaatatgctatagctattgttccaataattcatggtatttattgtttttgtttcaaatggattggaaaattctagtggataccaagtttgtaatttctttgaaaactaatatggtgttgttgagaagaatagccagtcaatacgtaagctaaagttttttaagacgatccatagtagataaagttgtttatgttaaatgttttattttcacttcgaaagaaatgcattttttcattacttcagcgcaagaaaaacagtttttttttctgttgtttttgatcagaaaaatttggacattcatttttttaatcgtattagatgttgatgttattgcatcaatgtttttatgtagtattaggaagtgaatcatttcttctagtttggaatgtatgcaatccgcaacctacaagaagtagttgattcattattgtataatatttattatagttaacagaaataatgtccaaaacatactcattatgatatatacaaaatcttttgacccataggaatttagtataacaagagattgtcgtatcctgtattatataaaaaaatgaagttcatagaaatgaaattgtaagttcaaattgatttatcccaagcatatttctaattagtattcaattaatagggaaaattgatacagtcatttatgagattcttttatattattacagttgaatatcagatatctagagatctttaaaaaaacaaaaaacacttctaacagatataagtaaacatcttttatattatgttataaagcatattgtcctaagaacatattttaattcattgaagagcaaaagctccaattttaatgataataagaaaatgtttacataactacgaaaccatcaaaattttcatgctttataaatttgaggaggtattagaagtattgttttagaaacatagtgaaaagcaaaaattaattacggtacagtatcttggagagacatagtaacgacgttaatatcggtgagtatatttattcttttagaggcaaaaagaaaattaaaacaattcaagtgtatattgctattgttattttaggaatactaaaaagatttaatagatttataacaaatcacaaaactgaataatactcagataaatgtaagttagctatatcttgaattgaatttggtgcttttacgtataatagagatgttttaataattactagcgactaaggatatttatttattagagtccttttcaagttttaattgccaagtatactaaggttaatttacacttagcagagatataggacatcaatattccttaaatttggtaattttcaaaattcaaagtaaaaatgttgttcctttcgtttaattgcttatttttaataacaaattttcatattgtagtattcaaattaccataaaatatttgtagttttatgttacaattgtaaaatttagtaagctatcatcttcaatatatggctcaaaagagattttatctttcaaatttattgttaaaatcactttttttccaagtgttaatttagcagtggagattactcgctgtaacttgtgtttattctgtatttgaatgattattcatgtgtaatattagaaatctctgctactttattgataatatcgccccattagtataaaatttatcttgaaaaaagttttcttgtgttttttattgcatataatgcctaagtgtatcactgactatttaaagacaatatcatattaatataattaatgataatatttgaaaatctaaaaaaaataaaatcgtctatatttacacagatgtattcttcagaaatattattgttatgataaattgttttgttatttcataattagcattgctataaaaaaggtatattcgacatatttgttgtatgtttgattgagtttctttatattattcataatgattgtgttttctaaggattttgacaaatccagaagattttagaatgatttattgaaaagcacaagcatgactactattattacaacagtcccacataacctgttttgatctatatgaaagaaaatcgaagacaggtatcctcggaaaacaaagtgttttgtagtaattgttggatgtctgtttcaaaaatataataatagaaaacactccatcattaaaacagatttggctagcaggggtcttaacaaaagtaattaattaggaagttttctgagatatttatttatgtttatttggtgttttattatctaacccatgtgaaattcaagattgaaaggactaatctctgtctcttcaaaggacaaatggttacctacaacagctgtgcacactctgggcaacaggattccagtagttgtctaatttaaggattttacatgtcccattaaagattttgctttcttttacaagtcgaaaaattttttttctctgactgcagatatttttcgtgagatttagctcgaaagccgttgacaatagagtaaaaattattatgacaaaaacactacagctttattccaaaaagggaaatgtccattaaaaaaagcttagattttgttttgtttttccgaattcagtggatagaatttcctcgagatcgcattgttattcaaagttgcaaatatttgaaaaaagaagaactgttaaaaggagtcctaattgaggaagatagactaggtacgtaagtcttcctccttgttgtagcatgtaacaatcctgtttaaggctagatagtagagttaacattacagaaaaaactcatccagtctttcgatacttcagtgtgtaggatagacacttttatagagggtttccagtacattttatggaaagtataaaatagaaatgagaagtattataattaaaaaataatatgtgttaaaatataagaatttgtaggtagtagatgtttatagtatactatgtgaagtattcttttgagtgtatctttaaaatgattttaaaagagaagtactctgaactatatattggttaaaactaatataaacaagtggattttgttttatttttattggacagttgtatagaaaaacaaaagaaaatataatatatttgttggactgtagtatttttaccctttagatggttgtaagcagtaatgtataaggtggatgaagatggggtgacaatatcaacaacttctgaagacgaagaactgtcaccgtcaacaagtgtgatggtgtaggtggtgtcatattttaatcgattttttgacatagaagcaaatctagtctaacattactaaaattataagcaccagtctaaattaaagatttaaatcgtgtattatgaaaagttgtcttaatcttaagtctaactattgaagaaaagcaaaatgaacaatatttacaaagaataccgtactttttttaagaaatgtattaactgtttcgtgcattctattcttattgtcgtttttttgagttttttttttaccaattttaacctggtgagtgtatgatggtcgttatactcttcaatttttagggtagaaaaattattaagtaaatcttaactagtattttagaagatgattcaagataatgtgataggtattactaaaaatcaaactgttggtattgttataatataagctggtaaatatatatatatattgatgaaaaagattgtttgtctcgaagatggaatgttatattaggatcaagataagaagacgaagtaataatttcacaaattctttttataggttgtaaataattattttttataaatattgttcatgatattctcagttttttctataatataagaagataaaaaaagatattcgtaatttatatatgaagggttatactaattaatcatggttatgatttttagtagcatcttaagtgcagatgctaatgctagaatttttcactatcctaatttttgatttcttaatttgagttctccacaatagttagttgtattaaatttcgtaagaagctctatttggaatactgaaatgcgcagtctacaggtaacaccctatattaaggggaaagacttggagtagccaaaactttgaagccaagtcgtaagtgtatttgaacaaatgatcgtcaaattaacgttggtggcagattactgaaaatttcatttaagaaatctctgattgttgagagaatgtgccagaggtaattattagttttaaggttggtattctatcttctaaggtttgcccagaaaataaaataacttaagatcagtttaggtattcaagatcagccaaaaataatgagtttattagtttagaattgaccattatgtgatttgtaaacgtttatagatataattaatatctatatttttgtatattatttataagaatccttacaaatttttgtctggacttttttaatgattttcaaaaagtttgtataagaatgaaattaataactatacttaaatattatatatgcaaaaaacaaacgaaaaaagaaggacggaaaagaaaaaatcaaatatagaacgacatataaatattaagagatgatagattcttataaaaattgtacaaagcagccgccaactatatattaatattgcttcatagatgttgacgtaaggcttcggaatcaaaaattctagtagagttcattttagactaaaataataggaaaatgtaacttacaataggatattggtggtattataagttttattgatatttatagtaagaaattagtggtactataaattgttattgtattgcttggttttttctttctacataactaatatacaagatacaatattatacagtatactccttttatcttcgaatcttctttaatataaatttttataacttacatggatgtattaatttttattgtagcaatgttaatggacattatttactctactcatatcccaatcatctgataactttgttactctttgctagacatagcagcataaatcttgaaataaattacaaccttaaacattctggataataaataatataaacaaactctgaatatgtataataacttattaattattatactaggactgtgttgttatctactctaaaatatgtgctatcttggatcttaactgtaatattaccaatatgaatataagtattagaacaagaacataactaacatgtttcaaactatctaatctgttataaatgatctaacaactcttccaataatgtatctataataatattctacattataaatatcacactagtagattattaattgtattaatttaacagaattatttgtgatactacaattcattatattaaaatgatctctttgattatcccaatactaatataacactatgacaatgagatagacaaagataacaatctatatgaacaataattaaacccgctactattgcttactgaatatatttttggtgttattaatattattaattattcatattctaaccaagaaagctatcattatttagaatgcttttatactcttaatagaaatttatatattaatatgtttgtttaatcattaagtaacgtatcaataatgatcattacaactatactaaataacatcttactatctaacaagttaaacatttctggcttatgtaatacaccaattcaaacaggtctccatatactatacccctaactctttctcattctttatctttttcaaattcagtaaattttaattaatcaaagaacatttcaccttttaatcatttcaatacatgctgatgtacaaataaaataacttgattgttaataaatcatgtggtaacagctgtttaatttccaacaggaatggcatctactggtattattataaaccttcataaaaatttaatatgtctccaaatttatttttctttatctaatgatatcatcattgtaaattgcaatagtctaacagcagatgattttgcactaccactaattgaattaagaaagtattgatgttgtacaattcattagagaactaaaccaaaaaggactggaagataattcacgtaactgtattggatatcattcagtatatgttcaaaagttagagagtgaaatcatataaaagcacaataaaaaactttacacctaacccagacataactcatagcattaatacactatatgacattaatcgttatccacaaaagatagacatttgctgaaagctgctgtttcatagaaaaaaatttcctgtttcattgtattaaatatcttataacatcttgtaaattgattactcaagctaaactaacgttctttgtttaaataagttagataacactgtataaagtaggaaaaatcaatttatcatttgatagtaatactcaaaacaaatactattccacttttctcaattgtatataaatatggtaactcagataaaataattcccacagatcagaaaaaaacctactttctgttgtgtatctcgcacttaaaccatttttgtttttaattacagtataattacatgttcatacatgtgtattatttgatttaatactgttgattgttggatattatgttggtgttgtaagaactgacaacagtgttatggaattttaccacttgacagtcagtaataatgaataaattttcatgaagaaatttaatcttggttattggtagggtgtatttttgtgagtgattttaatgcaatatttgtgatgtagttgggtagtagtacgatggtagttggcatagtgttgataattatactgtgaggttcatccatatgaatagatttcatggtagtagtattgaagtgatcactatatgaaattgatatgtgctatcagattatatcatttaggtggaagatactgtaagtgtttgtgtttatgtatttgtaaatactcatagtaatagggtaatcataccataaagatagatgtattttatttataaatatcttccttagtaataatccatgtacaaagtggattgtcgtgaatatactctctatagttaaggatatcttggttgactatatcaaatatatttatggcataattatatcatgttggatggtagtatctcaatgttatataatgtgaatttgtgaagtgcatagatctcaactgaggatgtgttttcatctgtaagcaagtctttttaatgttgtttgcatggtgtagtgattgatatctgtttgagttgtttttatttgattgaaaaaagtttttggaatttaagaaaaattcgattgcgaaaaagaaaaagaatgaaaagataagaagacaattttagcatatgttggcagttacagttctacaagcagtgttatattaactaactagtaggtctagatcaagaaagtcatgtaagaatgaataagtggctattctatattgtttgctatggtgtgatataatgcgtaataaaaaaatagtatgctgtaaagtgatagttgtagtgggtagtgtaatttaataagagctattactaggatatcagtaaaagtagatgtattaatgcacatagcacttcaaaatattaaatgtatgatagagagaagagaatataatgtgtagaaataaatctgaccagtgagatattgtcgtggtgttatagggtactgctgtgtttgtggcttattgaaatataattggagatatctttgacaatctaaatttatcatattaaatgagtgacacaatatcgtgtattttatttatgtagaataaaaaactaagcaacatgagataaatttacagcaccaccaaccctattataagtaaactgagaactcatcatactaccaatattctattataagtttatatcagttcatcatgttaatattataataatttttaaaaaggttttgatacagagaccatgaattaacatatgactgctagtgtcaataacatcttagataaattttcttattctcttgaaataaaatattccagaatgaaatacatagaaaaaatgagattataacagataacaaacaacgaaactatttgtacatattttactgttcgtggaggaaaatcacttgatgtccatataaataaaactaaagatttccttgtatcgtaccttaattttatttgcactttttgtatattattaaaagcatgttctgcataaaaagtaaagaacattgctataattctgtgtacaaataattacataatagtcatagaatacaattgagaatatatctggtttattcaatacataaaggtgtcaattctcaacaataacttctactatgtctcatagataatgcatatagtaagagtccaggtagctattaactattaataattgttggtaattaaatatgagatctaaaaaaagtgttaggttagatcatggatcccattatgtaatatgtattacttagtcaatattggttatattggtaaagttacatttttattattaggtctggagatatagagtgagtctacatcttttatctatccaagttatctattaatattaattccaagtcgactattatcagaaattaataatcataaggttatcacaattggtagcgtttggtatcatatcactgaacacttgaaacttctaaagtggtgtaatctatcatatacaaatatagttaattcaaactcatatagatagtagtttacgatacaacaactgcagcctgatagaaaagtaataatagtgaataggaatcaaaaaggaagagtggcaattaatgacctgtatcacattggatccaatgaacccaattatcggtgtgtgcaagacacatacaccatgatatttcccaatcttcatctttactgttttgttccactgtatacatttcgtaaaagttcagtttctatctactattaacgccatttcccaacagctcttccaacatactttgaagtgaaaccacaacaaggtttatatttccaagtagtttatcacagatatgtgaatacgaatgacgtaatagaagatcattgttcttctattaaaaatgctgcctgagttatgttaactactttgtaaaacactatagtttttcttattcaatataatcccattgcatccctacaatattcagtaataattattatactaattctcacatactattatcatctatttctataatatttgtttttattagcttttattttatcttcatataatattgaaagtttttaatacttattttaaaccgattcttgcatagtatgaatatcaatataatattaaatattccaatcttaaatttatctattaaaaaacaaatgctatactatcacgtgttgattcttccatactaatatcatataggtgtttattaactacatctctatatgctttcattgtacatataataaattattatacttctacagagtatatccctataatagcaatctattttatgtctgatcaagtatcatattttgatattaagcaatgctgtgttatgcaatataaataatactaaactatttttatacatatataaaatacttataccataaaacttaataaactatacaaattactagaattttaacatatatttattatttcttcaggtttaattttgtatcttcttgttcactaactgataataccatcacaaattacatcattaagtactctccatctgttagtcgtaacgaaatgatatagaaaattgtatatgttgtgacagttctagtgcttaaacttattaacagtagttgagtttcaaagtgatctaacaatcatatttactgatacctaacattagagatctttctctgaacaagcatttcaacttacttatttaattaaccctgtgaatacctgttttaaaatgcttagtttctattactgattgtatataataatttatatctttacaagtattaaacatatcaagaatatttacatatttattaaaattattataaacacatattgtatttaataataatttaaggataatatatactttatgctaatgaatcatagaaatccatataaagggtctattaaaataataacaaagtcaattatattatacattttcttaatcattaagtaaaacggacaagtcactttatatgaggtataaatagtgagatgatggtgtgtaaaagatagttcatttttctctattatttagtttcttcatgaaattctagcattagaagtattctctatatggaatagtaataactaaatcaaaccctaactagctaaaatacaactgtgttaggattgaataatattctctgcacgtcttctctttaattattatatatatattatcgaatcaacttgcttcagacttaaaagttgttagcttacctggtagtttatcccctaattcctatttataatattcaactctatgtatatatatatcttttatatattataataaatattcaatgggggatattaatcaatatacttattatatgttcatttgtattaatatataccataataatatataaaataacagcttagatagacctatatttccatatggtatagtatatttagtaagtactgttatttaattaagatatcttataagaatagttaataaatcacgatataaggagctgtatatatcaattgacagtattgatatgttcataaaatagtatgaggatccatgtgtgtgaagaataatatatcgtatgaagcagactactaatactagattatatacataaggtattactgacaacacagtgatgttatttaaatatatatacaccttggtatataattacttttgaatgtccatttccacttcacacttactggaaatactatctcaacagtacactctaaaacattctttttattactgatctcacatataaccacatatatttgtctctctcattaccattatccattaaatattaatttttaagaatatacagtacaatttcaatatcacatattgatatatcatcatttctcgttatatacaagtatcatttagtgttcacgcctatcacaatatcaagaatgtaatctccttacactctacttcatattacagatctgttgtgtcaaactaaatcacaacatctgcaatatatcaaccacatttgtttcattctattaacaagcacttattaagcaactaccactcctgcagttatttttactttctcatagttttatagtccacttcttttttcattttttaataataatattttacaagttctgaaatatcatctcaagaaacacaagagtaatatgattctagcaacaagaacacacaacaatataaacttacttagattaccgtattttttgccagtacattatttccatatttaattgacaatgaaaattcttcaatacctttataattctttatttgtttatatgatttaatctttatcacaatctagcaatatacaatcattcttatccatacagttgttgaattatgatcttgttttgttttttgatatactatttgcatagtaatatctttttatatcatatggaaataattagcatgtgcattcgcaatcaacaatcactttcatttactaattcctgcatatcaacaaaatataatatactcaactatattacagtctacaccgcactcacactctgtgatattttcttactatgttatatctaatcctattttatatgtatttcctctttaaattagttcaataaaattcaaaaagcatgatcacgagaatctaatattgttcaaaaatttcatggttaaatcttgtttttatttataaatagacagtgatctccattaacacactattattaattcttttaccaatcaatttcttattctaacagtatcactttatttatcctattttatcatttcttataacatcttaataccccttgtatattggtcatttgtttgttatttaattcttagaagttctcttttcttaccattgtatttcaacatatatattcttactctctttcaagagttatcatgacaatgaaatatcaactttaccaaactactattttttcacatccatctgtttgcttcgtgaaattcagatatattacattatctcttcttcgaataattgtttcatataacttattctgtgtttattattcataataatattataacctttggataaacgtatcttctcaccactgatacatcatcatatttccatacttttttactaatctttgtaaagtatcacgccttcattataccttatattctatgttacttctattgttatatattagaatgaaatttccacaataaaaaagtagttattatagaataccactattatatttgtcagctgtcttatatcttaatgtttttcaatacagtataagtatggtatctaagaaggtatgcaacccactcagctcaataaaaataacacacaatatttcaaatagttcatgtggcacgtacttgtgaatatttcaactagttctattacaatatggtcatctagtacaactttgcttgaaccagtaagaaccctatatagtgtccatcaaatggaatatgtaattaggaacatcacattagttacttcttgtaaatttgttatgcaacatcacaaaaatacagtctctagaaataatatttatatgacttaacctaactacaataaaatatatgtattaaatattgttgcttgtaattgttcaaattgtatgcacattagtcattactccgggttgttcttcaatccttgggtgattgatattctaatatacttttaaattggcagtgtcattcttgaagtgttataattagtgttcttgtatactcgttctttctagtgtacagtaaataaacagaaaaatactttcaaaaggctagtgggaaagtatagagtgaaccacactggagaaatctagcagatataacatgaaatatattctaatcgtagcattcattgtttaaactagttacttaacactcacaaagaaatatactagtcaaaacacagttacgtgctttgtattttttaaaatttttaaatattttttctcgatgtcatcacagaatttttttgctgcagcagttttttcatcaacgatgagatgaaaagtagattaagagaagaaaagaagaaaagagtatttgtagtaattatctttaaatagtgatgttggaattcttattaaacagaaaacaagatttcaatatgcagtggtatattttatttctaacatggattggtgtatgctcatgatgaacaattgaaaatagttatttttgtccttttatgatatgttatataatagtggtagtaacctaccatctttaaaaagtattaaacatgatatctcaatatattcatagtgtgataatatatgttgtgtttttaaaatatcaatataccttcttagatattatcatagttcaactattaaatgaagtacattagcatttcaagttctctggatagaagtctgtttaaagtgttctttgctatgctagtttattaaactttcattatgttagtatatatggattatttattaatgttcagttaaattattgtggttttataactccattatttgttgttgaatgttaacaatttctgtgttatactgttacttttattatgtcgtcgaaatagaatatttgagaatgaaacaaatggaacaatgagattccaacagatgacagatagtagaattcttgggatctattatttgtatagcactaaatgttaatgaaatcgcttgcttgatttttgtcattggtagaagaaaattcatagatactatatatacaaagccaagaatttcctcatattatatttttatttcatatacactatttttatgtattattatttctgtattgagaatagaggagacaaaggaagagcttcactttgattttgtgtattataaatagatagtaattatagaaaatatttgagaatatatctgatttattcaatttacatagattttaagtcccagcaatattagttgttatgatctcgtaccaatagtatttactaaagtatacaaaaatattatattataggatatatatatatatatatatatatacaagtacaatcttttttgttgagaaaacaattaaaaaattattggaagtatagagaaaagcactaatgcaaaacttgaccatttaactgcaatattagacgttgaagctttaaactgcgataatattatcgtgcttaatcttccacttggctttgcaatttgagaaaatataagaaaaaaaatactttaataatgtttaagtgtaaacatggctttgatattggcgatttgggtgtcattacaaaagaataattagtgattaatttttcattatttatctttgaataaccaaattgtttatacaaccacttgtaggttgcaaatttttttttcgattaaactgatattgttaggattaaaataaaaaaatagacatatgttaacatatcaattaaggtctgtactaatatttttaaaaaattttccttagaagaatttttttagaggacattttgtgcaaagaaatctaatctctcgagacttcaaatcagtcctttctaaaaatgaacaaaaagacatttcaaaagaggagacattgcaaatgaaacaaaagaaaaatgtgaaaaaaaacgataaagataccaagatattctattgtgataataagaatattgtgtgtgtttacactggttcagtcagttttagatacagactaaaaaatgaaccacagataaaatgttcccgtaaataaagacgttgccagattattttctttatttgaaaagataaattttttctcatcttatcagttataaaaaaaaagtttttgataacataatttattctcattttatttatttattctattgtctcttcctcattttattaaatttgtgtgttagtaccaaaagagctttaataaaaacaaattaactattacctgttataacttttctaaagaaaatgatttgacaaacacgatatctcttacctctcaaaacaacaaaaattaaaatcatcttgatataaataaattgattctatgtttaaacagcactacctaaattagtatatgataccaagaaaagactttatattcaatatattaatgatgatttcatttttttttcacttgaaaaaaatagacaaagatgacttactttattatattttaaccaacattctatatagaaacattaaattatttgcaaaggcatctattaaagctcaataactgtttattgttaaaataagggaatttttactaattatatcaacaaataatctttataacaacataaaatgtaactgacgatttcgacatgtaaaaccctttttctaaataggtaaacaatcaaaaatataaggtttaatatggtcataaaccattaaaagctaataaattatctcgtataaaaatcttgattttgatcaataattcagacttaaaaacgatttgagctaattttgtagcattttattctgaatattctggaattgataaaatgtgttaaatttagctggtactaatatgttttttccatattacaatgagactgtatcattatcagtgaataaaatgaggaatgctaactttaagatactttcttgaatgatataatgatatttctgtttttgtaatccaatgtttcctttggagaataatgttcctatagtgtaaatttaaaaagtcacttcaaatattgataaaagtaactacactgtaattaataattgtattaagaaaatttatgtccacttttttatctaacatttaaaaggaatcattgaagcaaaattaaacaataaaaatggtggaaagactaaggaagctaagtattcgtgtgtttttttaaaaaaaaacgttctcaactagattataaattctttcacaacttagatacaaattctgcgggaattaaataaactactgaaactattattgaaaaaaacaacaactgctattacaactagagttgcaagatattcattatttgatatttctaaagctagttccgcagatatcaacaacacaaaacaaaatgtaatgaaattttccttaatataaatcaattaatactaaaacagattatcagtatcaaagtaactcatttactcgggagagtagaaagaataaagtctatttggatttataggtatgtatatgtgactgatatgaatataatttatattttcttttcataaatccggtaaaatattatgttgctcaggttaaaattgagagtataaacattgtctcaattttttgttcagaaaaaaggataaataatttattgttgatgtacaagaagtttaaatattgaaatgttgacccagttaatagcaaactgcttctaaaaaaactgaaaattttaaaaacaagcataatactctagtaataccgacaaccattgagaagtcagccaatagtagctttaaaactagtatagtaataatttattgtatagaacagcaaataacttaaattacttaagtttaatgttattgaaaaatatgaatattcatgataaaattttttgtagtcccaaaaaaacagcgatctctatgaaaaacctattgaaccatattgatgaatctataatgaagagtaagctacatagaaattgaatgatggatgcaagcaatacaaacattttacctcctggattatagatatgctattttgactaaattcaacaaaagtagtaaaaaccatacaattgcatgtttgtttgtgaaataattcctaaggatttattcatctattacctattatcatgtaagctattgtatatatattaatatatttattgtactacaattgaaaaaagtttgtttaaatatttccttttcaatgactttaaaaaatttttactgtttttaagaacatattgtttttgttttatatgtattgtattgtccgcataaactaattattcaatagtaaaacttttttcattacaaaaactccctgtatttttttttttttgaactctagttaaatattctacattcaactatacaatactagttagttatagatgtaagtttttgaataaaacgatcacaatctctctatactttgactaaacaaagctattgtatttaacgatctagtagataatatttaggaagaaattaaaagcgttaaaaataacaacacatactcagtaacagatacaccccttacatacacttcatctaccaaattgtatttgcctcaaaattgaaaactatttttaaaacaaaaagaagacgaaaaaaagatggagagtaatctcacgatttcgaaaataatacaggcttacacaagatagcaggaaacaaaaacatttgtaaaaaaaattggtagttacccttttcacaaatctttttcctttattattttcccgatataaataaaacaattgtttttacttgcctcatatgttggaagtatactaaaaaggaaattcgaaataggtagactgtgaaaaatatatatatagaagttatgattacaaaagaggacagactaaaaaaaaaaacaacaaaggatttgaaattttcaatcataaaattctattgttcttaaaaaatattcctttctaggaattatcggattttgtgaaatcccttagaaagtaacaaacacatcataggttttttttttaattttttctgttttttttttcttgaaaaagcatgtcttagatgtatcttcaaatttttaatatcaagcgtctagggtaaaaaaatctgccctttgttattttattaaaattaagtaccttgcagttcaagttttaatgttttttttaaagaatatttaaccaaaaagataaaaaatgattttattcttatatgattgtggatagggattttatttttgacatactgcgtttagtctgtactttcttcttcttcatcagtgtagatgtagttcaaaaaattgtcaaattgttttcttgtaatatatttaagttaggtttgacttatcttttagaataatggaacgaagaaatctgaaaaaatctttctagggtaaaaaattgatagtgaaaaatattctattagccatttctccaccctattctttgctgagtgcataattgttaaagtaagcattcaagaaaaaaaatataacacttaaaagttagctactgacattatggttatacaaacaaagagggatatataccacttttttagatgtattgttattcgtactattatgaccaaacatgtgacttcttaagttattggctgatatttttttgaaggaaaaaagttaacaatttattttcaataagatctcgcttcaacaaaaaaatataatgtggaacaatagcaatatatataatatttgcaaaggcacaaactattgttcaaaatttcctttctagatatcggagtgatgtgaaattttccattctttattttcctatttttcgtaaaaagaaaatttgcccttcttacagtatacaaaaaaaagagacatagttttaaagacctatcaattatgaaatatctgaattatgtaaagaaaaatttgattaaataacgtatctcaaaaatatatacaaggactcatagtttagaatgaaacgaataaatattttatattttaaaaaataagttacgccttgttgcttgaaataattaatttttgacgtttaatttgatatagctattttgtgttcctcaatagaatatatattttcgttgagaatcagtacttgtatctatcgagtaaaatggacacatcctcatttaaaacaccacattgacagacaataaatcatatttcttattcataagataaacaaataatttaaagtaagcaaatgaatactaaaacatatactattatagttttttttactcttattcgtaataaatatgaaggaaggaagaatacacacaggaaattttatctattatttctggaaacaatgtctagcatacacaagaagatacatctgttaacttctatatttggtcatactccaatatataaaaatggtattaaatgcatttattttaagaaagaatgagaaacaaactcaaaattgttttgcaaaaccctactttgtttttttccgataggtaatcatttaccaaaattactacttggtaagtccaacaaccctataaaaaagaaaacaatagaatgcgcagatcttttacgccatctcaacaccaatttggaaagatcaaaatataaatgcataatgcatacctgcataggtatatcctgaacaaaaatctaaattttatcggttatccatatgtatgtttgatggtgtcctccatgattaattatcatacgcacttgtaaaatatacgtatatgaatatgtgtttatatctgcatttgtcaatgatatataaactggatcttttttctttattctttcgttcttcaacaggcttgctatgggtcttgctttattttcttattctcagttctccacctctgtaccatctgtaaataaaaatcagcagaaatcaatttaataagcttacataaagttaaataatattaaccgttactaatttgttatcattaaaatgcagacgttaattttgtggtccttactaggactacttgtgaccaaaataactgctgctactacaactatttcagcacctacaactttgtctggtgatcaaacgttttccgatgctatcgtaattgaatcaggtgctactcttgcattagtagctggttcttcatattctttcaatggcaatattgacgttaaaggttctttagacatcatcggtgattcaacaaacgggttaactagtttacaatttggttctactacaacaatcacaaacagtggtaacatcaacctcgaaaatattaaatcagcaggttctgccagtgattttgttattgcgcctgcaagtattgataactcgggtacatttactgtttcacaattaaatgctgctgctactataccaggtactaattttactatagctccaaccggttccttcattaacacaggtactattgattatgatacagctgataaagggggtaccacaaatgggttcctttaccttggtgctataacaaataatggtgttatcaagtctggtgggtttgctggcttaataaatcaagaatcttatttagtccctagtagatatgatatgaaaggtatcattttcaataatcctatagaaggtcaaggtgaagttactggtaatcaggggtctattgttcttattaacacaaataatattggagaacaaaccttcaatatttacaagggtatgtatattattaatccaaaaattgtaccaagctcacttatagtcaagaattcaatcgagtctatgattgtattcttaggtgttgactattatccatggtatgctaaaaattttaacaccttatcaagatatccacaaattaattttgcaatagatggtcaccgttattggttcaacacaagttgtgatggtggttgggaaacacaacaccagcactttactgttacaccatctgatcctctttatcaaattggtggtacttttatatacctaactaaattttattattttccttactgttcaatgatatctgaaccaattacaaagacaacaactgttactactgagggttttattactgaagctactactatttcaacagtaacaacatctacaactaaccagtacggatatactgtcactgaaattatctatgatgttgctgtacctgcagaatctactgtgtataccaccactaccggtacagtcagtgttccaaccacttctactttcaccagcattgtaaccaacagtaacggctcttcctctgctgaagttgttatagttatcatcactccacatccatctagttctgttatctcaactaccactactagtgcagtcactgccccagttccatctacctcctatacgactactactggtgatgtttctgccttaacaatatccacatacaccaccactgttactaacagcaacggctcttcctctgctgaagttgttgtagttatcatcactccacatccatccagttctgtcatctcaactactactactggtgtagtcactgccccagctccatctacctcctatacgactactactggtgatgtttctgccttaacaatatccacatacaccaccactgttactaacagcaacggctcttcctctgctgaagttgttgtagttatcatcactccacatccatccagttctgtcatctcaactactactactggtgtagtcactgccccagctacatccactttgtttactaccaccaccggtacagtcagtgttccaaccacttctactttcaccagcattgtaaccaacagtaacggctcttcctctgctgaagttgttatagttatcatcactccacatccatctagttctgttatctcaactaccactactagtgcagtcactgccccagctccatctacctcctatacgactactactggtgatgtttctgccttaacaatatccacatacaccaccactgttactaacagcaacggctcttcctctgctgaagttgttgtagttatcatcactccacatccatccagttctgtcatctcaactactactactggtgtagtcactgccccagctccatctacctcctatacgactactactggtgatgtttctgccttaacaatatccacatacaccaccactgttactaacagcaacggctcttcctctaccgaagttgttgttgttgtgatcaccccagctccagctaccttattcactacttctactggagatgtttctgctttaactacatcaactttcaccactacggtcactgacagcaaaggttcttcatctgctgaagtcattgtagttgtaattacaccatctccagttagcagcttcaagagttcatcgacttctgtatcttctattatatatggaaactccactattcttggtgaaaagactgaaacttctttgagtggaactttggtagttttaactacagtagtaaatggagttactatgactacaacttattgtccagaaccatccataacctctgaaacaggtatgactgctatcattggacatacttctattgaatctatttattcaaataaccaacaagaagagaccaactcattttctgctatgtccaatgcaactccagttacttccattgcatctaccacaactggtccagtgtttaccaacggtaaaaatcaaccaacatctagaaactctagagcatctaccactgttataggtagtagtgaagccagaaaaccagaaaaatcgttaaccacaatggtgccacaagcttcccaatatatttctgagcaaccatcctcatcatcaactgttactggattacctcatggagatacagcttctcttgtatcatatgagggtaacggtagtactatgtatatgaagtggagtgttgcccatttcattggtttattattttttatgattatttaaattgtatgcatgtaagcaattttaagataacaaatcctaaataatttactaattatataatgttatataagtttatataataccccaatattgttgcatactgtgtattttttttattatctattcgattgtttttctaatatcctataaaccaaaaatagatataattgtacttgataaaacaataataccgtctctttattctaagtaatttaaattattcaacaaagttatacaatctaatagttcctctataaatgttttaatataattatatttttgttacgatgttttgattatatttaatcaagaaaatcatgtttaagtaactcactattgcataatcttgaagctataaacaatcatgatataacgctcttaagaatcccaaaacttccctaattaaataactttataattgtataactctaatattgatttaattcaataaatctggaaaaagtactaataaatattgtaaaaaaaaaaaggaccgtaacaatgtttctttacctacagttgtatccgaggatttaatcagagtagggatccataaataaaaaaacaaaagtcttaaaacagtactgtcatcccactgtcactaattatttattcagttcttttccagtataatgtatatttatatgtatatatgaataaacacatgtgtgttaaatgtagcagatgcacatcttgcacacttatcttcttatttcctaatcaagcaatagatctataagaaatcttaatgtaagataaataagagaaaatcacgtgctctattggccgatgtatggctacttttctttgtttcggtcaaaaattcggccggttccatggtttcgtttttttctttttctttttttttttctgttgtttcgtcctaaggaaatttctgctgctgttggttggtccaatcaaaatcctcttttgtctgcaacgggaaaatgtctcactatctcacttatctccgtggaaataccaaaaaaaacccttctccaagaggaaaatctgctcagcgaatcgatggacaaggaaggtggcattttagtggaaaaacagtttgctgttattattgttgtgctttgctaatttaaatcttctaccccatctttgagaccttgtaatgagtcttgctcccaaagaacattgtgtctctgaaacgctcgagcagcaggcaagatttctatttgttgtgttcgatagaaggaaaaccgtaattctttatagacctttggcttagcctatcttgctgtcaaaaacttttaacttaaaaaaaaaaaaaatataaacaaaaatttcttactctttccctttctttgacttacctacgtttcatcgacctgtttcccttatttgatctttatcttctaggtttttaattatacatcttttttttttttcagttttcgtctttgctaaaccagacaagttagtaaaaataaacttttacttccagtttatcatatattttaacaacaagaaaaaaagcagaagaagcaaaataaaatagaataaaatataataataaaaaaaagaactcgaaacactacttatacccacagaataaaatcaacacaatatggctgattctatcccacaatattctgcatccgattattttaaatttgctttggctggtgccattggttgtggttctactcacagttctctagttcctattgatgttgttaagactagaatccaattggaaccaaccgtctacaacaagggtatggttgcctccttcaggaaaatcatcggggaggaaggtgctgctgctcttttaacagggtttggtccaaccttattaggttattccatccaaggtgcattcaaatttggtgggtatgaagtcttcaaaaaaatgtttatcgatatgttaggctatgacaccgcatcccagtacaagaacagtgtctatatggggtctgcagctgttgctgagttcatcgctgatatcgctttatgtccattggaagccactagaattagattggtctctcaaccaacattcgccaatggtctagttggcggattttcaaggatcctaaaggaggaaggtattggttctttctacagtgggttcactccaattcttttcaaacaaatcccatataatattgccaaattcttagtctttgaaagagcctccgaactttactatggtatgatcggtaagaagaaatctgatctatctcacagtgttgtcaccggtatcaacttgttatctggtttaactgctggttttgctgctgctattgtgtcccaacctgctgatactctattatctaaagttaacaagactaagaaagctccaggtcaaagtactgtcggtttgttggctcagttagctaaacaattgggttttgttggttccttcaccggtctaccaacacgtttagtcatggttggtactctgacctctttacagttcggtatctacggtagtttaaagaagactcttggttgcggtccaactattgaaattggtggtggatccggtcattaaagaaaacaaatataaaatatatttaatatgaataaaacagaaagacttgatgagttaatgttaatatctgacttgtccgtatgccttctttctatccatgtcatgctaataattccctgtctctatttatctgtttatatatatatatatatacatgtatatattctttttacctcccccctgtgctttagttattcttttcgtattcttttgattatatatttgttttcactcctctgttatattagtaaaagtagatttacatctatctatacattgagtatcatataatatatggttgtgcatactcatagaggagtcaaatatgtgaaaataaaacatttaattattatttatttgcaaaaaagtatatatatatatatgtgtgtgtgtaagtatgactttagtttatctttatgcatcttttacatcgccaacctttgatacaatcttccaaaatttggcattatcatgagtagtgaaatacagtattttatgtggatcatcatttgtgatagtgtttggagcattgaatgtgaattccgggaaaattaacacgtcacttaaaacctttggtgtttttaaattatggaactctttccatgtcactttccgtgcaatcccactcctcaagtaatcgttaaaataagtgaaaagtatgtcggtccagacacccgacccagtccaggacattatattcaagtcgtttctgaaatttagattcagttcattatctcttttacgcttcaatgttgtctctgtgatctgtgccacaatttctctaatggcaggatgtccaggtttagcttggatgatccaagtaccaaactgtagccttctcacataatcattcttccaggaattgtcttgtgcatcgtgttcaatcccaataataagaccgatcttgcgtggatcaacatcacctggaatccaattggggatgggttgcaatggaacagtatccatatctgcatatagaccaccacgtgccaatagaatcaggtatttaaagaaatcgattttcagaatctttgttggtagtgcgttgtaagcctcaatgacttctgggacagatgcatagtaatgacggaccattgcatatatgatgtcttcattaaagatttcatgaacgaagccagggttcttttcatcccagttggccttgttggaggccagttcttcacttataccttggttattgctgttattattactgtcggaatcagaatctgcaagatcatcttgaacagttctcctattaattacaggtttatcgtaggtctgccagatgaatgcaggaaactttcttaagctgtcgtattcaaaggaatacaccagtttttcacgtaaagtggcatcacttggtaattttttcagttctttgattttcttttctaggatacgacgttgcctttcgaattgtttggtttggtcctcctgttttgtcttaagcagttcggatagttcttcgaatcttcttatgatgtcttcgtcactttgttggtttgaatatgcgttgtttatgctttggctgatctcctttggcaagttttgtagtagagcctgtaaatcgctaccttttgaattattaaacagtttccaaaataggaggatacctatagccacagtggtaagaatccaaagggctctttttcttttgttccaagtctttcttgatttagacatagtttctttgaaaaccgttaagaagaaagggaataataataataaaaaacaaaaataaaaaataaaaaaaagataaacaaacggataactaattgattgatgtgcttgttcttatgtaggaaatatccaaacctctatatacccccacatgtacattttaacaacttgctacctatattcctatcattttcagttttcaatagcacacagcgtaatgttttctttttattttttttttttcttttggatatctgcaaaaattttcccaatttctcgagaagtttcaaaacaaaaaacaaatagaaaaacaatatataaacaaataaatagttgacattagagagtctacataaactcatacagatacaaatatatatggaaaagagaaagagagagagggtatgcatatatatatatgtgtgtgtgtgtacggtatatgattaaacgaataatgatttatctcttacattaaacttcaccactatctcttgtaatagttgatatgctacatagacacgagcaggtatggagaatttcgaatcttgagggtccgttatggttaaagtttcatcggcaaaccgtttggaatctaatgggacgttaacagtgatcaaaacgtctgtatcgacgtccttgagccttaatagcccgacacaagagagcaggactcgtggtggttcattgactttcccccacttggcaacagattccagtaagatacaagtctgtgggacgatgcctgcagcagtcgaagacaagacgctgtgggcttcgttgtcgtatttgagcatcttccagtcgctagacccgttcaagtcgctgatctctttcaaatggaagtccagtgccattctatcgtccactacctcgaccctttgcaacagatcaaagattatactttcgttgtagcccaagccatcgttagacacaggggctgatggatcacgactgttcacgtatacttcttgtgtgtcaggtacctcacgtagcagagagacatctaggaagccatcaggtagtactgtagtaatggcacccccatacaattcaacagtattcaaagtcatcaatattatattatattatattatattatattatagtatagtataggataggataggatatatgcgcaaatatatatatatatggttttttttcaccccccctttttcttctttctttttttcttggtgtttgtctaagcagtaaagagaaacagttttacttcagagaagacgtttattcaaaccatcaacatgaaccatggcaccaacatgaaccgtctcatcacagattgtcaccattaaaggcattttgcgttttgcatctgtcgcttcttttcgtttttttgttttgtggtggcagcaaaaagcggcgatgcggcaatgttagctgtgtttttctatgcggtgcgtgggtcttgggcacacataattgtgtatctctctctcactctctacatatatataaggataagtgtaagtgcaagtataaacgtgtatatatatatgtatgtatatatctgtatgtgtgtgagcctgcgtgaaaggaaaatacagttactgcacttcttgctcgtcattcaaccaagagccatacaataaaataatcgattcagaatttccaccccatggatacacaattgttaccttcagaaccaaaactatctatcttagaacacttggaagcattctcttccactgtaaactttgaggacaaatacttccaatactgtacctttttcgtcgtatttaaccctgtgttttggaatattgtagccagaacagaatataactaccgtttactgaccagattgaccaagtcccctaaaaccggctgctacctactagcccttatcatcttctcgctcggtttactccgtgactatatgttcaatcaagccttaagacaacagctgcctctcactcttttacaaaatgacacagtgaagtgcctggctgtcctgtgttttgccatgggccagttactagtgatcacgtccatgtatcggttgggaatcatcggcacttatctaggcgactatttcgggatcctcatgaaggaaagagtcactggtttccccttcaacatctccaataacccaatgtaccaaggctctactctaagtttcttaggcaccgccttgtactacgggaaacctgcaggcctggtgatcactttgtttgtttacataatgtataaggtcgccttacggttcgaggaaccatttactgccatgatctatgccaaaaaaaaattctgaacaaagagataaagttgaaacaaaaaaaaaaaaaaaaaaaaagaaaaattgaaatgaacttatatatatacatgtatgtatgacctatttatttatttatttagttacttacttacttacttcgaattcgatatcacgcataatcacaccttctagccccttgcctaaattgcctagcaaatccacactctcattcagtgagtcgatgtttgtctcgtaatcattgtctaaccgtgctgttttgccattgaatttatatatacctgaacttccagcaaatatagttttcccatcatcttctatcccacatctgttacatagcaacaacacactatttcggccctcaaatttccagcttttctccttggacatgcccatatatgatctttcgcgaccaaccagactttcattcagctggataaactgtctataccacaaacttttgcggatatttagatttaggaatggtaggaaccttaggatccaataatttacattttccatatccggtgtctccaactggtcatactgagaatcagacaagagtgggtcctctctggatatcctcctctgtgtgcagagctccttgtttatatcaatctggaatacaccttgtgacccatgtataggtaattgcaaagtatccagtgaccttcgtatactttccaatttccgattgatcgtatctaagtcatggtcatgtttcgtgatcgatttggaatgtagccatgccatggggcatatcatcaaatctacgttattatcgagacagaaactagaaaactcaaaatcgttgaacggtgcctcgaatttataagggttcaaatccatacagatcccaatagacgtatccaattcaatatcagcagcagcagcaacggttccatttttctctattgcacatttttcaaaaaccatagtgaatttctggaaggactgaggattctcttgacaaccccattcgtattcggtatcatagagaaaagactttctgtaattgaaagtgagatccccactgggatcagtgactaaagcactattgtagaggacagactcaacttgtctaccgtgcttgttcgcatccatcgactcctcagggtatcctatcactgtgtagcaccgaaacaatttagagacactctgtgcaaatttgaaggattgactgttgcgtgtgatcgagacatggggtttgatttgttctttggagtggaaggagtagccagtgagtgcaaattcaggaaagactaccagttgcgggtacttcgatgagtcttgatccaaaatcgatttgagtctatggaccaggttccatgttctttcgatgttctgttccaattgacctacttgtggattcaattgaaataatgctactctcaaatcaaccaaatattttgacattgatatattattgaactaccttctataacacatacacatacacacatatatatcttattactctttctctttctctttctctttctctttctctttctctctctctctctcttatccatagtaaacgaaattatcaatatatattttttttgttcaacaacaaaagagaaaaaaaataaaaaataaaaaataaaataaaacaagaaaagaacaatttataagggaatttgtgtgtgtttatatatatatatgacaccggcatcacgaacagacataaagaagcagctgaagaaataattaaagaaacagagaaacggtacgaacgtgaagttgaggatgaaagtgtttgacggtggatacgatagaagaagcacggatcttaatggtgttgactacaaacccgtgaggattcttgtagacgttggtcgtgagtcagatgccaatggtggcgaggatggattgagaatagacactctgccatgcatcaaatttggcaatacacaacaagatggaaacactgccacttctttaaccaaaagtgacatgtctcccaagaacatgaaaggaactgaacaaacaacaggcaaagaagatgagtatgtgtctgtcaatagtaatcttccaatcactgaactgcacgatccaaagaaccagttgagttccttgattaagaatgcaaaagagaatagggactccctcaagcagagaaacagacgaatcaatcaagcccaacaatggtctaagagacaatatggatggtaaaaagaaaagccatcaacatgtcgacttcatttctttttataatatgatgttgtcatctcttcacaggaacacgtgaccagctcatcgaagcaaaaaagaaaaaaaggaaaaaaaatttttttttatctttaacttttcaatctgcaggttgatggtttttgttatgttaacgtttactatgtggttgtggctgctgctgctattggtgctgctggctgtgtatatgtatgtgtgtgacggtgcatctctgtgttgtaattatgattgcaggctgtgctaacatttagatgattttaagggcattaggaaacaaataagaaagacagatcttcacacatacacatacaaacatacacacacacatacacaaccagtgtttgtgaaaacgtttagatttcccatctttttctgttccatcaacataaacaagaacattcagtataaatttattgtaataaacacataaacatatacatatacatatacatatacacatagacaagataaaagaaaaataaagtaaaaaaaataatttaaaaagatatgtcagttgttggttctcttatattttgtttagattgtggtaacctattagacaacccaaacacagtccaaggagacctagtggagtgtagtcaatgtcaagccacatatccaaagaagaacttcaccaatctggaagtcgtgacaacaaccgcagacgacgctttcccaagtgcattgagatccaagaaatcagtagtcaagacctcactaaggaaagatgagttgaaagaaggagccatcattaaagaaaagtgtcctaagtgtggtaacgatgaaatgcattaccatactctacaactaagatctgctgatgaaggtgctactgttttttatacttgtaccaaatgttcctacaaattcagaaccaataactaaacccctttctctctttctctctctctatctcgcaatatatatatttatatatacttattctgtatactatctacatatgtcaattgctatagtacattattaatgcattcattacaaacaccaactcttctcttctctactcattcaacaccaggcaatggatctttgacagtttcaatcgattcggttgcgccgttcagagtgatggaaaaattatcattgtcattattaccattattattatcgacaaactaacccaaagataaaaaaaaaaaaaaaaaaagaaataaatatatactaatgtgcaatcttataactgtggaaaaggctacacgtccctcttaggaatatctatttgacgaacctattttataatctaaagggctgcgagagtatatatatacgtgcaagtggggcttttaactattacatctgtgaaacagtctctcttttttttagtccttttttttattattattactattattattattctcgtttttaagatgactacttcctcagctcaaatggaaatgccagatttatctaatgccattgtagcacaagatgaaatgggcaggcctttcattattgttaaagaccaaggtaacaagaaaagacaacacgggatagaagccaagaagtctcatatcctcgctgctagatccattgcctctatcatcaaaacctccctgggacctcgtgggctggacaagattttgatctctcccgatggtgatatcacaatcaccaacgacggtgccacaatcctttctcagatccaactggacaacgaaatcgctaaattattggtccagttgtcaaaggctcaagatgacgaaatcggtgacggtaccaccggtgtagtggttctggccagtgctctgttggaccaatctttagaactgatcgaaaaggggattcatccaatcaagatagccaacgggtttgacgaggcatcgaaattggctgtccaaaagttggaagccaccgccgatgccatcgtcactgatagtcagttggacgacctcctatttaaagctgcaagaacttccttagggtccaaaattgtgtctaaagaacacgacaagttcgctcaaatggccgtgaatgcaatcaaatctgtcatggataaggaaagaaaggatgtggatttcgatttgattcgtttgcaaggtagagtcggtggctctttaaaggattccatgttgatcaatggtgttatcttagataaagacttctctcatccacagatgccaaaatgtttggatgcacaacaactcggcaaagaagacattaagttggccatcctcacatgtcctttcgaaccaccaaaaccaaagactaaacataagctagatatctccacagtcgaggaatatgaaaaattacaaaactatgaacaagaaaaatttaaagaaatgattcagtatgtcaaggactcaggggcagatgtagtcatttgtcaatgggggtttgatgatgaagctaaccatctacttttacaaaatgagttgcccgctgttagatgggtgggtggccaagaactggaacaaatagctattgccactaacggccgcattgttccaagattccaggatctatcagctaataaattaggtagatgttccaagatatacgaaatggagtttgggaccactaaggaccgcatgctagtcatcgaacaaccagacacaaaacacacaaagactgtgacatgcttcattcgtggttcaaataaaatgattgtggatgaggcccaacgtgcgttacacgattcattatgtgtggtacgtaatctagttaaagattctcgtattgtttatggtggtggtgctgctgaagtagctatgtcacttgccgtctccgaagaggcagataagcagtcaggcattgaccaatatgcattccgtgcctttgcacaagctttagatactataccaatgaccttagctgaaaattcagggcttgatccaattgagactttatccttattaaagagtaagcaaataaaagaaaatgcagctaatattggtgtggattgtcttgggaaaggtactaatgacatgaaggaactatttgttgtcgatccattgattggtaagaaacaacaaattcttttagctactcaactttgtagaatgattttaaagatcgatgatgttattatcagtggtaaggatgaatattaaaaagatcaaataaaaaatctatacatatttttccttccacactccttgctctctcccactttcgccttctctttctctttctgtctttatatatatatatatatatgtgtgtgtgtgtgtgcattattatatgataaactgtgtaaattataagaaatcaagaaaaaaaaaattaaaaaaacattctgtagtgagttatattttaaaataaattcattaaaaatcgttgatatacatacctgtgttatttatttacttatttatttatttattcatattcctatgtctattcttgtttatataccgttttaaaagactatttataccatgttaaataaactaaagtttctaacaatttcaggaccatattcttcataatcttgctttgtatgacaatagcctctaaattccgcggtttgtgcgagtaacgaaccaccaaaccagactgcatttctttgttttctatgtgaaataactgaaacatcaacccctgtagatttagtaccagtcaatctttcattttgtgcaattctattatttactatagattttaaatctctttgtaaacgacgaccaaaatctttgaacatcgtagaaccacccgatagtacgatgttgttgtataaacctttacgtacatcgattgggcatgcttgaatagtttgatccactaaggttggtaatggagtcaagaaatcggaggatgcaatctcaggattgaagaaaatttctggtgccaaaaatctttcgtaaccaatatcgattatttttttggaggttctctctttgttttctactacaaattgtgcaaatttttctggatttctatcaaatttattgaattctttaacaatatctggacacacgtaacaatattcttgcttaatacgctctgcggtcttcaatgaggtgtcttgctcaccacgttccctcaaaagtgactgaataaataaggtgatatccctacctgcaattgggatatttttaatagctgaaccaataacatacccttcagctacaggaatgacgtgggtgacaccatccccagaatcaatgacagtacctgttaatgatctgtcaataacttttgaagaagtccaagatgcagcaagagccaagacagcttgtactgcaatatagagacctgcacagttgaatgattcaaagaaaatttctgccacttgttctctattctcaggtggattcaaaggtggctcagttaaaaggaaatagtgatcttctggttctactctcaaatatttaaagatagaattttcccaaaatctctccatatggtcccagttctcaatttgtccatgtttaatagggtaagataaagagtaagatggaccttgggaggcgatcaatgcttcgttcccgatataaaaatccaaatcttccgtgcctcttttcccagccagattatttgatagtaagacatttgaactcaagttatcaaatgcagtagcagaagtagatttagcataatatgagtttttattagtaccagtaccagtactagtagcaccagtagcagtagttgaagaagagtagttagtgttggacatattcatggatgtgtccagcttcttagaagaagatgtagattgggatccctgtgaggtggcaatagccgtaggaaagatccaggatggagaatcattaccagcaaaacccaacttggttagcccagtaccgttatccatcacaatagcaggattatttagatacgacatttgcagtgataaaataccaaacttataatataaatagcagaatcaaaggaataaatatatgtatgtatgtatgtatgtatacgtgtgtatgtgtgtgtgatactaatttaaggagcagagagtcccaccttattgttttgttttttgtcttagaagaggaaaactaaatacactaaaccaaaataaagaaggaaaaacggatcaattgaaatatggttaggaaaatatcattaatcaattatttaatggtactctcatctcagctttctcaacttcaaaactccaaaagcatcctgtcgcactatcgatccaacttctcgcaagtttatttcaaaagagcttctccctcatttccttcaaacgaaatttttcaacttaccaattgcggctcgaagagggtaaccaccggagtcttccgggaacacacattcaaaaagcaaaaagaatccaatcttgataagaaagagagagtagtgaaagaagaggaagagagaagaaaagccagtcttctactgtagtagatcagccatctgataaggaaaataattaaactgacagtcaaacaagcagccatatgcatatatgtgtgttctgaggtttgtcagatagataaataagtagagaaaaagagggacagagagagaatacattatattgcaagaattgaatatctatttacatgttaacttttagtggtagatcaacacctttcaataatctgcatagctcacagacatccagcaatatcttgtccactgggttttattccagagaattgtccacagatttgactgagtcaatagatgatttatttagacaaaatgcttctaaactgttgaattacgagtatacgaataacagaaccaagaataatggtcattaccatcaatatagtgaatatggccactcaattaacatgtttgatgacaacgacgatagcaatattatagcccagatggaatttgatttaatgtctcagccgtcgctgattatgggcgataaatcctctgttttaatcactttagacaacattattgaggctattaaaattaagggatttgaaggacaacggcatttggtcaagtatctggagagtttcctaggtctgttggccagagaatctaatatcgaagagctacattattatcaaaaatatattaacacaaaagttattcagttggtccgagacaccagccatagtaaaaataatagtaaaaaaattataaatgcaaaaattggcggtattattgccatacaatgtttaataagattctattcaaagagtgaagatataccgaactatatccataagctagtggaagcactctggggactcctttcatctcctaatattgaagtcgttaagttggttactcagactcttggtagtctctctaaatctgatggtccactaatatcagattatgtggaggatgaaattaagcttggtctagactggttgatttcatcttctgagaagaaacctatctccaaacatgataacagaaaacatactgctattttaattttatctacaattgcagcaaattctccatattcaattttcccacatattaatctcatattggacaatatatggaaaactttgaaggacccaaacaaagatttaaggatagattctgcaatcactctaaaacaatgtcttttgatcatacaaaggagagataagacacttttcaatcagcaggtagcatcctttcttggagcgtgttcaaatgaaattaattccaataacatagatataatacattcctgtcttttggtgtataaagttttaatatcgctaaacgaacacgagattttagataaaacttttgatgagatcttttcactttcatggaactttaaggataataaaatagattatattagacttgagagttatcagttatttacattattatcttcttttaattcagatcggtttactaaaaactatcttaatcaaataatgatgatgtatctaaataaattacaaatgattaataaatctacttcctatatcgataagattgaccatccaattttaataagatctgtaggtgatattgcatttcatttaagaaaagaaatagatccatatttaccatctattatagaaattttaaatcatgatttaaacatgaaatataaaagtagaatattatttgaaaaggaaattttttactgtattgccagattagtagagggaactcagtcagaaatgatgctttttctacagaattgtttgcttgcatcaatgcttaaatgtcctctaaccgactatatgcaattcacattacaaattataacaagtaaaatacctgatttagaaactgcaattagtgataaattattgagtctaatatcgttaactttatctggtagttcatttacattgctaggttccccaggagaaagacagccatttactatgcaaagagcaagagaatggaggaatgaaaatgaatttcgtcaaaaaaatattacaaataatgacgaaaatgataaaaaaatgattatacaggcgttaaggatgttattaacattagattacaaataccaaatgacagattttgtcagagaaacaacaatcagctacatagaacatgaaaatacacagataagaaaattggcagctgtcacatcctgtcatttacttattaaagataatattggaaggcatacctcattgaactctttaaatatagtatctgaagtgttatctaagttattgaccgttgcaattactgacataaatcctgaggttcgtttaaaaatattggaaaatttaaaccatacttttgatccacatttgtctcaaccagaaaattcgaagttattatttatgcttttagaagatgaagtgttcattattcgagtaactgcattaaaagttatcggtagacttactactgttaatcctgcatatattgtcccagttttaagaaaaactctcttagaattattaacagaattaaaatatttaaaattacctaaccaaaatgaagaatgccttacaatgttatgtactctaataagttctactagggagataacgaaaccctacattgaaccaattttagatatattattagaaaaattacatgactcgtcttcttcagtgatttcaagtgcgctgagagttatcggtgaactttctgtcgtaggtggagaggatatgaacaattatttggataaattaatgcctcctattataaaagcctttaaagatcagtcgaatacgtataaaagaagcgctgcattacgtactcttcgtcagttatcctctgcatctggttatgtgataaatcctcttttagatcacactgaattgcttagcattttgattaacattctgaaatcagattctcctcagcacataaaacaagaaactgtgagtcttttaggtactttaggtgctttagacccatacaaatatcgtgagattgaagagatgccagatgatgctacgactttagaacaaaattcaattccaattgatatatcattgctgatacaaaatatttcaccttcagtcgaagaatattattcaaccattgttgttaatactttattaaaaattttaaaagataattctttgagcgttcatcatccaacagttatacaagccattgtaaatttattccaaattctaaaattaaaatgtgtatcgtttttaggacaaattatccctgcaattattaatctaatggatgtgtgtccagactctctagtagagtattatttgcaacaattaggtgttctaataaccattgtaaaactacatatacgcccttatgcagataaaatttttgactgtattgaatcacatttttcagataataaacttcaactaaccgtagtatctgtaattacatcattggcttcctctttaaaaaatgaatttaagagatttgttcctccagttttaacctatttcatgaatagtataaataaagatacatcaaaggataaaactgtaaccgattccatattgacttgcattgttttattaggggataacttaaatgaatatttgtatttaattattccttctattatcagaatagcagaggtatctcatggtctgattaaaaaatcgtctattgtaactttagggaaactaaccaaaattaacaatataaataccatgtctgctcgaatcattcacacatgttgtagattgctatattccacagatccagaagttgtgcgtttaaccatgaatttattgtgcttacttttactacaactaaaaagtgattttattgtgtttatcccttctatcaacaaattacttattaacaaaaatattcaacatactgtttatgaccaattagttaacaagttattaagcaatgagatccttccatctgcccatatactagggttagagttggaagaagataaaacagaagaacaaacaaagaaccaacagccagaaaaacttactgtagatcaatctcttttgaaatccatgtggaattgttctcagcaaagaacaaaggaggactggcaagaatggttaaaacggttgtcgatccagttgttaaaggaatcgccctctcatgctcttagagtatgttcgtctttggctagtgtatatttaccattagcaaaagagctttttaatgcatcgtttgctagtatatggccagaattatacactcaataccaagaagattttgttcaatctttatgtttggcattatcatcaccacagaatccacctgaaatacatcagatgttattaaacttagttgaattcatggaacatgatgataaaccattaccaataccatctcaaacgttaggagaatatgcagaaaaatgtcatgcttatgccaaagcacttcattttaaagaagccaaatttttacaagaaccaatcgacaatacaacggttgaatcattaatcagtattaataaccaaatttaccaaaacgatgctgctgttggtattcttaaatttgcccaacaacactataatttacaattgcaagaaacatggtatgaaaaattacaaagatgggaagatgcaatggatgcatattcaaaacgtatcaaggaaggtgatacttcaccttctgtagtacttgggcatatgaggtcattatatgcgctaagtgattgggatagtttagccaaattttcttcagaaagatgggattctgcatcagcaagcttacaaaaaaagatggcaccgttagcagcaaacggagcttggagtttggcccagtgggataagttagaacaatatattagtgttatgaaggacaaaaccccagataaggaatttttcagtgctattctttgtatacataatggagaatatgactttgcaaacgaacatatatacaatgcaagagatttattggttacagaaatatcagctttagtaaatgaaagttacaacagagcatataatgttatagttagaacacaacttatcacagaattagaggaagtaatagcatataaaaaattaccgtcgcactcggagaaacgtcttatttaccataatacgtggaataaaagattacttggttgtcaaaaaagtgttgatgtatggcaaagggctttaaaagttagatcattggtcatcacacctaagcaggatatgcatatttggatcaaatttgctaatctttgtcgaaagtcaggtaaattaaatcttgctgaagctgccttgagtaggttattagaggatacatcagacatatcaccatcgttacctgcaaaagcaccaccaccagttgtgtactctcagttaaaatatttatgggctgctggttcaaagcaagaagctttaaaatacttgattggatttacatctcgtatggttcatgatctaggtttggatccaagcaatatgatagcccaaaatgtgagtcaaaaccattcactatcggctaataatatcgaagaatatactaaattattggcaaggtgttttttaaaacagggtgaatggagaattgcattgcaacctaactggagagatgaaagtcctgacgccattttaggttcctatttattagctactcattttgatagtaattggtataaagcttggcacaattgggcccttgttaattttgaagttatatctgcaatttcatcgggtagaagagtaaatactgtaaacactgatgaacaaccaaaaattatagaagatgttgaagaaagagttaatgaaggtagtagtattttaaagatagatgggaaagaatattctatggaagttatccaaagacatgtcatacctgctataaaagggttttttcattctattgcattatcaaagactagtgcattacaagatactttaagattgctgacattgtggtttacatttgggggaacacctgaagcttgtcaagctatctataccgggttcaacttaattaagattgatacttggttagaggtattaccacagttgatatctcggatccaccagccggatgagtctgtgagcaggtctttattagctttattatctgatttggggaaggcccatccacaagtaatggtaaatcctttgattgttgcaataaaatcagaatctgtttctaggcaaaaagcagcattttctattattgaaaagatgaaaatgcatagtacaaaacttgttgagcaagcagagcttgttagtaatgaattgatacgtgttgctgtactgtggcatgaattgtggtatgagggtttagaagatgctagtagacaattttttggggaacacaacacagataagatgtttgctacattagaaccgcttcatgcattattaaaaaagacaccagagacaatgagagagctatcatttcaaaattcttttggacgtgatttaacagatgcctatgaatgggtattaaattttcaaagaaccaaagacaccagtaatttgaaccaagcatgggatatttattataatgtttttaggagaataagtagacaactacctcaattgcaaacattagatcttcgccatgtttccccaaaattattggaggcaagagatttagagatggctgtaccaggttcttattctgttggtaaaccaattataagaatatcatattttgatccagtattttcagtcatatcatcaaaacaaaggccaagaaagtttacaattcgtggtagtgatggtaaagattatcaatatgtgttaaagggccatgaagatattagacaagacagcttggtgatgcagttgtttggtttagtaaatacattactagaacatgattctgaatgttttaagagacatttagatattcagaaatatcctgctattccattatctccaaaatctggtttacttggatgggttccaaacagtgatactttccatgtcttgattagagatcatagagattctaacaaagttccattgaacattgaacattgggtgatgttacaaatggctccagattatgataatttaactttattgcaaaagattgaagtatttcaatatgcaatggataatacgaagggacaagatctggctcaggttctatggttgaagagtcgttcttcagaaacatggctggatagaagaactgtatattcaaggtcactagcagtgatgtctatggttggttacatattagggttaggggatcgtcacccaagtaatttaatgttggatcgtgttacaggaaaagttatccatatcgattttggtgattgttttgaagctgctatcttgagagagaagtttcctgaaaaggtgccctttagattgacaagaatgttaattaatgcattagaagttagtgggatagaaggtaattttagaatcacttgtgaaaatgttatgagagtattaagaaacaataaggagtcgttaatggcgatcttagaagcttttgcattcgatcctttaatccactgggggtttgatttcccgactggtaaaattatggaagaaactggaattacattaccaatggtcaatccgaatgaattactgagaaaaggtgtcataactgttgctgatgcgcatagaatggaggaggaacaagaattagagttaagaaatgcaagggcactattagttttgaaaaggataacagataaattaacaggtaatgatattgtaagatatgaaaaccttgatatacctgaacaagtagataagttgatcaagcaagctatgtctatcgaaaatttatgccagcattatgtaggttggtgtccattctggtaaatttttcttaatcaatatttattttgttttattttattgtacatatttatatatttcatatttgagtctataaacaattcacattatattggtcacagtatttcttggttattgcgttccatttccctaccaattcatggaaattgtttaacaaatcgtaattctcatcaaatgcattcttattcaaaacatggttaatttttaattcttgttgggcatctttgaaagattcagctaaatcacgattatccttgccatataagtagtttaagcattgtaatctaccaattataagacctacttccttacctaattttgcaccctgtggaaacccagcatcaaaaccctcttgaaggttaatttctttagaacttacaattccatccaaataacctcttttattatgttgatctcttaacttgtcaatatctttatgaataatattatcttcttcagaagtagatccccatacatcatcaaatagttcagatcgactcatttccttgtatttttggattgtaaaagatggcacaacgatagcacaactaatcttatagaggagttaaaagggaaataaaaatgaaaacaggcccttatgctctcgagaattgttgaagcgattggacttctacttatttctatccatataatccctctcataatggtgtgcgcttactaatcattgtgcgtcaaaattgtcaaacatcaaaatttatgtaatattcttgatattactgtttagggttttgtttaaaaaaatgagggtcgacgatatttttctacactttccgttttgcaaaatttcacaaacatacataaaaacaggagtaaccaacataagtacaagagtgcaaccaagaagaacaacaaccaagcaacgaataagaagaaaagaagaaggaaccaaggattacataaatttagatatatagtatataagtgtatactattaggttatcttagattagggatatagatatacagatatataggaatattacatctagagatatagaacgagtctataccttatatctattcaagtgaaatattattgagatttcaacaagattaactgttatcagaaacacataatttcagagttattacaatttagtaaaaaaaccttgcctcctgtgggatttgaacccacgatccccgcattacgagtgcgatgccttaccacttggccaagcaggcgataaaaaactcagtcggagaggaataatagttgtaaacattgatatagatattattataatgttggatttttttgatttaatttaattgataaaattaattaaataaaaaggtttttaaatataattctttgaattgtcattttttaaattatttttataatgttaccgatttttttgttgttatggaaaaatcatttttagaaaaaagtatttgagtatattaatattctattgctatttattgtataatcagattaaattttttcctaaatttttatcttaccgaatataaggattttatgtgctgttttatcgttttattcaattacaaaaaaactatctactaaatttaaaagaataaaaatgtaaagaataaaaatttatgtgatataaaaaaaaaagttcattgaacattaatagtaaaagaaaaaaaaatagaataaaccaactctgaatgttgaaactccaattttcatagtaatagttgtaattattgtgttattaaaatttaacgttttaaaggaaaatgtagtatggatgattggtcattgtgaaatattgaaagcttttaaaacattaatatgaagtaccttgtttcattcatataaagattgaaaaaaacactattaataatatacatagtcatatcaatgattttattttatctttttagtattttttttttttaaaagaaaacttttactataaaaaaataattagaaattggcataaaattgatattattcttaaatttagatatttttttgaagacttttagttggaaattgctgaaatcgaacgttctagaataaataaatagactaattatattttagtaaacattaattgataataaaatgtggagaatgtattgtttgcttatcagtggatgtaaacaaactttatcaacaatttggtgtcgcacgtggacaaaatatgccagatatgaaaatatataaagccaacattttttttttcatatcatgtttcttcccttgttaaacttgtataatcatccctgtttgttatgtataaataaaaaaaaaagcgaagaacttaatcatagatttgtacactaaatatattaatataacattaagaatgtatactatttatctaatatctaaaggtgctaattttcaacagaaatcttgaaaaatattgtctgtaaataacgttaaaggctgttacgttggattagaagtaagcaaaagtctagacctaaattatgagtgtttttgaaagattatttgattaatgttactgtcaatttattgagaaacttattcagaagacttctaattgtttaaagtgtgtgtgctagggttaattagcaatagtaacatttatattttatcactatttcttaagcagaatttaatagatatataatataaataacggaaattatataattggttgattgatcaaaatcaataactatgtaatcttcaaatgcttaggtatgattgctattaatattttattatattatataagggacctgcctacattcttaactaaaatctgcttctattttatttgcatcatttttctttttttttttttactttccttctttttaatctttttgttaatgatgttttgttgggaatggaagatttttcttcatatttttttatatatgagtggatcataaagtttttgtttgaaattaaaataaaacacttcttatcaaaataactattatatctttttctaatacctaatttaaaaatgttatgctgaggacatagacatattgagatgtatatcatagcttggcattttaataataggaatatgtcacaaacatataaatttaactaagatgaattgctaaatgtcacaagtaattctctactctgtttgtatggtgaagtgactgaaaagtcaaaatgcgcatgtctaaagtatacatattttaataaattattgaatatggttatttacccaaaacaaggcttgaaagagaggaaaaaagataggagtataattttatgtttttacacatgttataagtaagtttccaaaaaatcaagataataaattattttatgttggtgataatgacatatacagaaattttttttttcatgttgagtccccaatgttctactattcacatattttcgtgaaaaaaaaataagttctaatatcaaaaaaaggatacatatgtaaacttacataacagatttgcttttttaataatttcgtttgttttgtatttttatttttgcctgtaaaggataactacatagcagacatatactttgtgtaatatgctatttagatatatataccttcctctatagtagatggaatatctgtcataccataaacacccatccacgaaatgggtattttgaattgagaatctctagacactgaatatttctcatttattatcattggtaagcaacttctaacaaaatacttggcatccattgagttatcaccttcatgaacgagcatagtgaagtatttaatttcactcaaggaggaattgaggttatttaataggtggtaaacgatcttaaagattgtttggtttgtggagatttcttggattggatcacttaaattgaatttgaagaattgggatgtataatgtaagtttgaattggaatcgaattttagatttaacgattgttggaagtttgatgttatatcatttattgaattgacattgcaagtgccaatagatatgttggtagcggtgttagtagatatggtattagaaatagcactcgtgaggtaatggttattattagtatcgttgttgttactattattcattcgaaaactagtaacaatatttgtatcgaatacaccgtaagaatctagtatagacaattttctaatcttcagtctattaatcaaggggctcaacacctcaatgataaagttatttatatagccttgtataattggagttctttgttgaagaatataaactgacctgtctttattagaaaacaattctaaggcagaagagtataattttggcctttggttttttatatccgtaagggatgaactataaagagatggagaattattgttacttgtgtcattattagaatcgaaagtatgatctaagggaccaacaaaaggatgtaagtatttagaatccaaatcttctacaaaatggaaatcatcatcaaaggaatgtaatattaaatctacagtcaattgtggaacattaccagtcgaaactaaaggcaatactagtgtcattgaaaatgaaaaaaattagaaaaaagaaaaaaaaaaataaaataaaaaacaatcgatttactcccaaatatcaaatatgtgaatatgattgaagtttagtatcttcctgctctttctacctgctctctccctttgactctttctctctctttctagttggcaagcattattttatagtaaaatttattgaattcatcatataatcaccaccacgaccacacatcaaatcggtttatattcacaagaaaaaaaaaaaaaaaaaaaaaaaaacaaaaaaaaagatgccaaacatccatacctccataagtgcaacaaagaatgaaaaagctaccaaaccctaactaaaaacctaatttgtatcggaatttaactctacaaataaagcaatgacctaacttttatgtgtaaaaggaaagggggagtaaacgtatccagtctatatctaagtttatgattagagattgaataattacttactcagagacaaaaatttgcttttgtaataattttaattatcatttaccgacattaatacatcaagtagaatctttctgttcgttttgttgttttttctttttttggtagatcctacaatcaacagaaacccaaaaagaaaaagaaaaagaaagaagaaaacaatattttcagctattgcacttgggacacataagttggaagtacttgaacaatctggtttaagcatgcccacatgcaatggcattcaatctaatcatatgtaatatatgtgcttgtgtatctcttttctttctttttttttctttacttcggtttgtttcattggggtgtgtgacactgacgcatgtcacaaattgagtgcatgacacaaattggctgcttttgtgttttcttagtagggaaaaccaaaaattttcgaaaaagggaaaaataccagagagtacttcctaaaatggaaaaaagacaacatcacttcaaacgaacagttggtgactatggtgcacggatgtttacaaataggaaatgcggaagaaaaaaaattttttttttttcattttcgtttctttttttttttctgtgtacagaaaccaaaattcgtttgtgttgagaaatcaaagtaggagggaaatgagggaagaagaagaaaaagaagaacaggaacacagaagggtgtgtatgtgcagtgggatttatgaatgaatatcatttcctacttctaagcagtgtctattggatgaacttgtattttatatttaagttgggttcaagtcattaagattctgttagtctatgcagttttgttgttgtttctttttttttttccctctttcaccctccgttgcaacactacagttatacatattaatatacttgaacattagacatattcaccagtaacaacaagcaaaaaatatatattagagtcactctattttcaccatttcaatggaacttcaagatccttcaatattatctgccactacagcagagggtaccacctttcctgtgcctcagagaccctttgttaccaaaaattcaaagaattccgctcatactaataaaaataataatcattttgacagcaagcttgcaattatcaatccaattaattcctttttagataaactagcaaattctaacaacaaacttaatagaccccttcagacatctatcttagactataaacccacctcaaataatgactcaaagatcatatattccataaacgaattattggaattcaaatcaaacgtccccactcaattaattcgcagtaaacttgatgaattgccatcaagaaagttctggagattacatcaaaggtttaatcctaactcagacgctaactatcaccaccatcatattcacgctcatgcatacaacaataacaataacaatagcaataacaatagtaaatctgtatcaaaccctaataataattcaaaccctaacagtaaccctaatggtagattgggtaataacaatagtgatttcttaagacatgagagaaggaacagcagatcgaagaataagctccataaacaacagaataagcttagtatggcttcaaaaaatagtagtattggtacaactaatgctaatgttaacactaatagttcagatttaggtgataaattattattaaacgatgatatccttgaatttgacgataattttgtgccaagtggaaattcaatacaagattttgaactttggaaagcaaaaatgaaagaaattgaacagaataaaggtaagaataaaaataaaaataaaaatgacatcaattccaatcttcaggatacgaacactactaataatatcaataatgacactaatatctcatccactactgttaaaaatgatgtatccagtatagaaagacctatcttgaatagatcttcaagtagaatctcagatttcttaagactatcgaacgctgaatctgatgcaaatagcaatagtaatagtatcaaaaatagcgaaaataaattgagtacagaaataacgttttcttctaatataacttcagttacattggagtccactttaaatcaagggtatggaatcggtattgatcagtcctcgaatatcgttaatgtctctagaagctcttcttctaagttttcttctttcttcaatagcaacactatacctgcaaaggacgtggatagtgatactaataaaagtaacaataataataatcaaatagatactactactgctactaccagtaacaagactaaaagtggtacttcaagattaatgaatttcttcaaagaaacttctagatcaaacaccccagttagtgaaacaacaactttgcacgataataatagtaatagtaatagtaatagtaatagtaatagtaatagtaataatcaaagtaacactcaaggtatcccacaaggaaacttcaatttacctgtacaaaatcatatttctattggacaccagcaaaatacatcaattggattgccatatccaccacaaacacaaacacaaggtttaaatcaaatccaacaacagcagcaatctcatcaataccaacaaattcctttgccaacgatgcaaggaccagcaaacaatacgtttttccaaggtttattgaataaaaataaatcattgaagaataacactaataataataataaacttgaaaataatgaaggtgatatatcaaataatttaacttcaacagttgataatccatcaactatagtgccaacaaataataacggtgtcccaagtcattgtaatcaaaataatatgaaaaatggaatgggtattacccctccacccggtatgttgcctcctccacccggtatgccaccacaaaatttccgtatgctgccaccaaacatgatgggacatccaatgatgcaaggtatgcatcctccacctccacctccaggtatcatgcaatttccatctggtcttattaacaaaaataaaaataagaatgatatagatgacaatggcaaagataataataaaaatatcagcaataacccacaacaaaggttttatcctatgatgccaccacctagtggattcattccaaatatgcaacatttgcctccgaatacacaacaacatcctcaattcatgccaaatatgccacagttccctccacatatacatatgaatgattctaatgttaaagacagtaataatactgataccaatagccagattactactgatcataatgttaacgtcaatcagccaaataataatgttaataatttgcaaagatttttccctaatatggcaacgaatccttcacaaattccattatctcaacaaaaataagtatatcgatctgaataatggataaaaattgttccagaaagatgtatataaaaaaataaaagaaaaagtgaatacatgtttattttattaatgttcctttggaacaagatttcagttatcttttcttggcttttgcatactaaaaattatataactctatgctatttttcacagacatatatgtatgtatatgtatatgtttatatatttatatatttacatacacatatgttcagttattagaatatattgcagatatgttgtgttataataatattgctttttatcttggttcattaattatcaaagataaataatatatatttagtcgtcctttagttcatttttattatctaatttatcatcaacattttcgtataaagtctataatcagtaatacatataaaaaatgcatattaaaaatttggatcgctttcaaatatcgtgttgatttgattttcaatgccattatatatgttaagtccagccttatcaatattatatgcattatttgtagagtcttcattttccaatagtttgttgccaaaccatttgtttgagttgaaaatagtaaatttctgagaaatttcgtcaactattgaagacagtacagattttttaatgtcttgtaattcaatatggctcaatcttttctcaaattgtctccatatcctactctcataatctaataacaacgcatccttcataggagagctcattttatcaccaattctgtctctcataattgacaataacttggatttatcctttacagacatccacgtatcaaagattatctctaattctttaacacgataattagtaacatcaaatgtggtcacagtatatgacaataaatcataatattcaccaataaccatattaagtaaaataaatttgagatcagaaaaggatagtgcactgacttctgatctgagaggtagcatatttttgaatataccgttaatattggctattctccttaatattggaaataagatccattgtttcaacttcggaatataagttttaccttcaaaactctgaaatccatatcttttgggaacagtgtattcagtttgtaatgattcaatagctttattaggaatatacaccctcaccccatggaaatatgtcaatcttaatggagaaatcatatctaatctactgaaatgatgatttctacaattaacgatattcaatttttcatgaagatggtatttttgagcatcattaaggcccctatcataatttgtgtgtttaatttgttgttgtctctcctttcttatcatcttttgaacatctgcaaattgttcgtaagtaaagtcatctttatgatcaaacatgtatttttcaagatctaataaatttttagaagctaattcttcacctaattcaggattagttaacttggttttatttattcccatgatttgttccttaatttcattatatttatttggtggtattatatctattttttctttctcatatgaagcagaagagacacttaatccagtaatatcaacataaacaccagaatcaacatcaataaatcttgcgtcaatattattcttaccattagtattagttcgaacagagatagaaggtgtgacatctaaaaagtatcttccattaccctctcttgggtcttcaaggatcaaactttggttaaaatactgtgctaataaatgtaaatgtttgattggcatctgtacatcaaaatcattatcccatggaaatgctaatccgttgtataaatgtgcatatagagtgccatgtgatatccaagagacaagcccattgctttggacaaaccgttggaaaactcttataagtgaattcattcgtgccttcttatttatgccagtgtcagttgcagcaccattatagaatcttttatctctatggccacccccacccaatttactgcctattaaattatctgcttcttgtaaatatttcgaagcaaaagctggatgtgtcctgtatgaagttttaagattacttaagtaatctttttcatgtaatgacaactttttatcatctttcttatttatagattctaattcttcaattttggatttgacatcaaatttaaaatcatccaaagtcaattcaaatctatcgatttgatatagactactatttttattagggatttcgagttcaaaaagtttatttattgaagtatcattaataaaatcttcaaagattttaatatggtcaaatttataatcatctttcttctttatattgtcttcaacaaaatttgataaaaggtctgattgaatcatattgttacgttgttcttgctctatatatacttggaaggcagatgtattggagttaaggatagtcattgacaggggattacggaaggtgctcagtagatagtttctcgcactaatttgataaacttcaggcctgatttttgtccaaatattattgactttaaatggcaaattaaaagggctcttatataatggatcattttcttcataatctatacagaattcagatatattataattttgtatacctgattgaaacgacgttatgcctcgataccaaaagttatcctcatattttgatctatctatcagaaataaaaaatcactcaattcttcttctatctcgactaaaagatcatgatctatatatgtctttgttgccaattgacaatttaacttgccttgaaatttattcttaactgacaataatttgttataatcatggtaatcagaccagtcataccatgagaatggtaatttaaagtcatcagatgatttgagatgtctactgtctattgcgttctttaaaatatgatacaggtatacagaccatatcaatcttggatcactatcgtagaaacttaattcttcgattgagtttaattgcttggtcttatttgaacccatagatacggtcaaaagattggatttaaaataataatcatcaatccaacttggacttgtgtcaaaaaacattttcctataaagtgcggaggcatgttcgattgtttcagccggagttgatttgagtaaagatagtaaatcgaaaataggtttagtaaaagaatatattgtagaatctggacttgtcccagtgttaccattattatttttattattattagtagtggtggtggtagtagtgctagtagtgctggtatcatggttggaagaataaaagttgtttaaactatcttcaaaatagcagttatatatccatattgaaacagcaatctgtagtaaaataataattaatattattactctggtagattttattctaacttttctaaatcgctttaaatatgaggggaataatattctaagtggtgatatgaccattggattaaacgcaaataattatattttgttgaatatttatggatggatgggtggatgtgaagatgtgtagaactgtggaaaagagcttttttaattgtttatggtggtgacactaataagtaacactaaagataagttttaaacttgtgtttattcttattggattagttgatccctttataaaaaaaaaagtgataaggaaaaaaaaagagaaaaggattagtaatgtgtttcttacgagactattaataacatctacgacagctaaagagaagcaagttcttactagccagacatgacgttggaaaagtagagggaatgttgtactccgtttttatttaattcttctgataaatttcaaatgtttcatctcatctggtgtaatcctttaataaatttttttttccttcgagaaactaaaaaagaaggcaaggtagaaaaacaaaaaaaataagaaaaacccctcaatcattgtttcttctagagtacttatatatttaggcagtgcctgacaatagatttcaaaatagtaggcttttattcttttctttgtcatacaatactagataacaatagatatgtaagaaaagtttgtgtaactgtttatcctattgttaattcacaaaatctactaattcaagattgaaaagtgcaaatctcctttaaaaaatgtctacaagttcaaaaaaacaaattgtctttttctgttttcaagctagaaagtattttacttaaagtgtaaaatagttttgtatatttgtatttcaggcattcaattaaggttgagtattatttcaagggtgtatataggagtatgtaacaagaaaatagtcttaaagaaaagactaaaatgaacatcaaacaagcaaaaaagtggagaaggagggatataagaataggcatttccactatataaatataagtagttttattggacaaggaggaggcaactgttccatgtgcatgaatagtgaatattatacatgattttacctgtaaaaaaaaattggcctccttccagcaaaattttaaataacctctaacttctttttttgtttgtgtgatgtatatttttctgtaacaagatatttttacaaaggtctgtgttattacaattttatagaaaattgtttgaaatgttcacaactgttacagattaaattaggatggatttcactctaatttccccatttggctaaaaaccaaaaaaaaaagaaaaagaaaaaaaaaaaaaaaagaggggataatataggttacaatttttaggggaggattgtacttatcacttttttttaaaaaaaatttggaaactttaggtttttctttcctattgtgtttggtctcttggcatttttgctaattttatgaatttgtttcctatttgggaaaagatataaggatgcagaaattatggaattatctgccgtaataagtgattcttcctcttccttttccttgttatttggtttgatagctttataaaagacatctttactatgcatactactttgtaatgagagaggatggatactagatagcatatggtttatgtaggagggtgaaaatgagagtagttttgttatatgttataagttatatttttgttaaaattaatttacttgactttaacctgtttagagccagttttcctttttttttcgtttcgctctaatatattaactttttatattatcagttgaatattctgtctttcttgtgattattcaactaagttattaaccgcttaaaataactgttgtttgggttcattccggggaaagggatttttcaaaacaaaaataactaaataaataaataaaattatcagaaatgttaggattacaaccatcctactatttcgtctctgaggagacttatattattcgggccaagggctaaattgcttgaccgttgaaatcggacttgagtcaatcaaaatagatgtacatacagactttcaattttggcccagtctatttccccttataatatttactttaacagatctcaaaaaagtcaattttattaataaagtcattagttataacaataaataacacaaatttgtatgtgaagaggtgcatatattgagtattcggaatcatacctaaagtgtcatcatttacatattttcctatatttagtaaaataataataagtggtcaactcatacatacatatacatatatatatatatatatgtgtgtgtgtaggtttactgttgaacattagtatcgtcatcactttcataaggtatattgtgtttttttaataaatttttcaaaaatccaatttctttatatgcattggctaaatcttcttgtaatttttcatttgcagctgtgagttgtgatgcattttgttcgcttagtagtttttgcaacgtccatttctcgatattagaattttctgtttctttcaatttttgtatatattcaaccgatctacttaagatcgccgctttgctagtctcttttacaggtaataacacacccaatgcattaattgccatattaatgttttctctacggcgtctttccacttctttatgtgaaatccttctttgttgtttccatgcttctgatcccacaagtgcagtggtcctgcgaccttttttatttaataagccttcctcgttcaggtctggatcttctactcctatgctatgaaaatgctctgtatctcttagatcttgtaactccacaggtatagagtcgtctgtattgttaatcgtatgacgatcaattaggtccgcatagtcatgtggggtctgtacctgccctatatgttgttggtgttgagtattcacatgaacgcttttacttctctcttcttcctcaatttgagttttattgttatctgatgatcctttattgggattatctagagtagtcttcgtcatagaccctgttggatcagattctgtactggaatgtttcaaactatgttcaccatcatcattgttattgttattgttatcactattgtgattgtgattattaagggagcttctattagcaacattttctatgatattggaagcaacattgtttaataattgagtttccctatcatggtcatttattctatgactattactatcactgttgctattgtcattactggtagtagatagacttgaatgattggtggggcttaataaagaggtttcaatggggacatgttcattatcatcattgacattgataatctctatgtctctatcgctatcaatttttggtctttttggatttggttcattgtctaccatatctggatcatatttgtgtccattatgtttttctgagtcactcatcttgattgaaaattgtaaataataattaaaaatctaaaaaggaaaagtgaaaagtgaaaaggaaactaattgtaatattgtatcagtaaataattctgtttattcgagatggaacttatctcgagagtttaaccaattatatttttatttttcttcaatactaaaatatgcttcagaagaagtgttttaacgtattatctatcactcaagctgggttctcttttttttgacaatagaatatgttctgtaacaaaaataaaaaaagagaacgaaaactgtggctactagcaattaattgaattggatctttgagttggatgaatctggaagacactagtcaggcatatatgggcacgtatatacatataaacaagaaattaccaacaatttgttcgattcttggtcctattgcgatgtttacacgtggatatcacgttttccgtgaaataaaaacaacaaaaaaggaaggaaataaaatgtctcctactcttcgtcaatggtgatattgcacatgtttttgtgttttattccgcgtattcctgagtttaattccgtcatatttgtctgtttgaaaagaggttttttttattttcttgaaaggatgtaagtttccacctcatccctctttctttaaaggaaactctttttatgtctttacgtcactacatagaattagttattaattctaacagatgccttataacttattcatgaagatatgtgtttaggggcaatcgaagagataaccggtaatatttgggaataatattagggggaaggcagggaagtcaagtgacatacaaaaaatatagttgattagttgataaatatattgcagcacacatgtgaagaaaatcctaccctaaacttgacttcacagcgtagtcaggtgagagtatagagaataaatctaaataaagccatatagaaagaaattgtctactaatacacattgaactaatatatctgtgtatcattgtactcttctctatatagacgtatatatatatatatatacgtacttattatatagattttttttgctgtttcaaccagatattagagatcttaaagtcattgaagtgcccgtggtaatactaccaggtatatctaaatggtgatgaacaactgatcttctcttttgaggtgtgccatttctagctactgacatggaagaaatactattcacaggagtctgggccaaactgcttgcttcactaccaatactattaccactacctggactctttaaagttaaatcattcaaattttcagtaataatattatctactttttgtgcctctagatttgtctttctgtttcctattactgagtcttcttgattatttactttgctattattatcctgcacagcccccttaccaccattaattaatgttgtttcagtaatatcatgttccaactctgtttctggcacagaatacaacatatctttactacatggtgtagtagtggaacttctagatgggtgagcactagcagatgtttgtatttcattggacaaatttgaaccaccttttttctttgctgaatcactgtcgctctttttaaccacatttttgatgggtttcattggagatgtggcaatgtcaaccattgaccttggtttaattgttgggggttgtggtgaactgtttgtattggatataggactagtagtgcttgagttatcagttgtctgtttcatattaaaaaatgggttcgatgtatgttgtgcaacaggagattgaattttcattgtatgagttgaaccaatatcatctgtagaactattagtaataatactgtcattttcatttgttaaaattgtaccgtccgcagaagtagctttcctgatctctgggacttttgttaatgtacaatttgcaccgtcaggatcaacacaagtctctacagcttggaaccatggatcattgaacaagtcttctagagtgtaccttgtctctgggtttgggtcagacaatctccacgcaatacgtgtaccatttgtagatttgaaatgcctcgataatgaaaattcactgcctggaccaggtttataataattcttgtctctgaaatgtgggttctggtgtgaaacataattttcataagaagcctcaaattctctaaatcttgcatctgtgttacatgattcgataaaagggattgtaccgttaatcaaagtgaaaagcataatacccaatgcgtagcaatccatacctaatgggttataaggtttttggaatttttctggataatgttttttggtatcccaatacatgacttcaggtggagtaaaaggtggcgagccaatcataccttcacatagtttcactggagatgagaaatcatgagggtctgtatgataccaatcagagataccaaaatctgtcaatttacagaccccatctctcgttattaacacgttttctggctttaaatcacgatgtgcaataccgttatcatgacagaatttcacaccttgtgcgacctgtttgaataaacaccatttttcattgataggaacagccttccagccagttctctctattaattcgaaaagatctttgacacccagttccataacaaaaccccagcctctagtcgtataggttgttgtaggaacttttactaaaagaaaagttggcatgatatgaatgttattcgacaaagtcttagcaataatgaactctttagaacatctcttgtagaatttttctggtgtttcgtcgtagatcatatttagttttttcaaagcatagacatccttctgtctatatgaagatctgatctttctaacttcgctggacccacctgaaccaatagggctattgtctgcgtcgaagacgaagttatcagttaaatgaacactaaattgtttcatgtggtcaggtaaataactgtttggatcctcgatgggtaatggtaacattctaatcttggaattaccgtcatgtaaatagaaacttagatcatccgccttcccctcatttccaaaggcagtgcctggtctactgttgataccatatgggttgtagataactttttcagacggcaaattgtgtatacttgtacatgtcataattttaccattgttgttgttgttgctattattagtagtagtagtagtggtatttgaatgagagacaaaagtttttgatcttgctggtgtggctaaatgatgtgtatatggagcgccaggattctttttggtactaattgatttggctctgtggatctctgctacagttgctctattggttaatggtctttcgtcgctagtagtagtattagtatccttttcatcatgcaacggggtcataacgaatgggtttatgttgtgcgcagtcaaatcggccaaggccacagaagaatgtactacatggacatggttaacttctttattggcgtttcttagcctagtcacaaaggagggtgatctgtgacgggcagtactctctgcatctcttttaacgttagagataggggagttagaattgaggttggagacaccgatatttgatgtggggctggttccatgagggatatgggactgagttgaagtattgttatttggactattaattgcgtgggaggaaaacgactttttccttgatggggcaatggagttaccacttgcgataacgttgtatgacggttctggatgtttatttgcattcagtattctttttcctagaagttttaaaacagagggactcttatgaaggtctttatctttggaagcaatagaagatgtaggcatattagattatgtgaaggggaaaagggggaaaaaaaatacaaaaaaatcagcagaaaggaaaaagaattagattaatcaatttctaaattgttgatgtaatttatctatatatatatttatttaaatatatttttctttttattattaagtccagtcagacaacaccaaatatattagatgaagctagattaaatgtatatttatttgcttggaaataaattttttcgcaaaacagtagatattataccccttatgatgtgaaatttttaatgctaaccgatacgttagaaacaaatagaacaacaacgatatttgaatattaattacagtgcttttgagggactataggggtttataacgtcattacagacttctggaattgattcttagattatctggatagtgcaaacttatgtaaataaatcaagtacacaggtaaaaaatgtcagttgtaatatattgtgaattatttttcaaataaaatgatggaaaggaagaaaaagaaaaagaaaaaaaaaaaaaagaaagaaaatccagagtttttttttttctgacattcagaaaaatgagacgtttccacttttgtccatcaacaattccaaattccgtttttatgtgtgaagtgggtgggggaaggggagtttttttgttttcttttgttttcctcgaacaaagaaaataaaaggaaaatggaaacggaaacagaaattaatcagcgggatcagcgggattccattccgtggcggaaataactgaaggaagaaaaaaaggaaagtaaaaaaaagcaaaaaaaggaaatttgtccttttctcttttcttctgttttccccacccatccctaattttttcttttttcttttttcttttttcttttttctttttctgtgcatttccaaatattttgtttctcttacacgactgaagttgcacgtgacgtggtacaaaattgttttttggcggttcggcggttcggcggttcaaaaagagtaatcagagatcacagataagagttttatggtgttttagatggttttcaggatttccaattagggcttcttatagggatcttcaggttttaaaaataataaatgcactatagcacatgcacttatctactctatctataagcaaatacatgttgaaccttccccccttccccttgaaaattttatcaataaataaataaatgactctgatgactatattaatcaatatatttgatataaatatataatatatcttatataaatatagtctgtatatacacttctccgcttcaaaggtgtgaaatatttaaatacatgacataaaacttattatcagtttaaaaaaaacgaaatagacatgaaaaactttttttaattgaactgttcacgtgatattttatctagtacataaatttcaaaaccaggacggactctgttgtagtatggtatggtgaaattctttgtgtattccagggaagcgcaaataatattaatagtcattcaagtaatcaagacagtaatcaattataggcgataatataattactaaaacggtcttatatattgagcggctttaacgagctaatatatttattcaaagttacttggcttgttccttctatttatgtttatatataatatataaattatttacaggaaacggttatggaagatgatcttttatctccagaaaacgttgtccttttatatgttttctggagctcgatcgattattcagattagtacattaatgacttgactgactcaccctaaaatttattacattaatttaggtgcactagtggattagaactgcaccccaattctctaatcatggtgattagtaatacacgtgggacttattaaaacaataggtaaattctagatttgttaaatcttatgtaatccaatctctttattatgcagcatctaatgttgtagcacgtttatggcttattaagacaataaacagttctagattcattcaggatcttatgtaatcttgatggttataacttttctattccacaacagaccctgttatagtttggacttaggaccaattttttttttaacagtactattgaacaaatagtaagggcaataacaaatatataagaacgttatatatatctaggagaattaaacgattattgctttttcttttttgtattatacaatgtgctacatatttataaatcaaccaaacatataaatttagataccaagatactggtcctttatatatgaactatgggttgatagtttcttatttgaggttctgtaacgactgtcaccgtagatacatttctccttaattagctatttaatgtttcatgaatgtttcattttgttacatagtattcaacaatcatgtgggatttaccaacaaaccctaagtcctataaatccaaactagaacttttcttgacaatcatcacaaaaccctaacaatatttttataatcataatatcaaggttgatctacgacagagacgacaagttcgagcgcaagtggtttagtggtaaaatccaacgttgccatcgttgggcccccggttcgattccgggcttgcgcaatttcttttttgacaatatgtaatattcttgatattactgtttagggttttgtttaaaaaaatgagggtcgacgatatttttctacactttccgttttgcaaaatttcacaaacatacataaaaacaggagtaaccaacataagtacaagagtgcaaccaagaagaacaacaaccaagcaacgaataagaagaaaagaagaaggaaccaaggattacataaatttagatatatagtatataagtgtatactattaggttatcttagattagggatatagatatacagatatataggaatattacatctagagatatagaacgagtctataccttatatctattcaagtgaaatattattgagatttcaacaagattaactgttatcagaaacacataacttcaggattattacagaaaaactaaaaaaagcgttccatgcgggactcgaacccgcagtcttctccttaggagggagacgcgttaccattacgccaacagaacagacataaaacactttccccagttagttgctcgtatatgatagtattaattagttggacaacgtcgaagtgaaaacaatacatatacggcccttaatatattatattgctatattgagctattaggaaataagagtttattactgtcatttccataagaattatttttaattagtttttctgtatattatgtggtgtacggatgtaccataatatcaggaagacattttatttgtcaccaaatatgtttttcgaagatttgaaaagaaatgaaaaactctaaaagacttgaaataaatacaagaatgtatactgtatacgctgtataataagtatatacatgtatttaatacaaaaaaaaagcaagcatctataacttaatgatgcctgccattaccatggacgctgagggctctaaattccaacttgttttaagtccaaataaaatctttaatctttttggtaatatttgccattatataatttttgtgaaccccaatttattttattttaaactctatttaagtcacaatccttttgaaacctccacatactcttttcttgtaatgtttttatgtaatctttatgataggaaaaaatgataatcaagttactatatgcatcaatcaatttcttaaaacaattaattatatcaatgagacatcattataataccaattacttttccaacattatttcttttattttccattaacttaactataactatccttgtacatttaccaaaattgatatagtactaaatttttttatcttgataaaacaagaattatcataaatgtttgaaaacaattattacctctgagagatacttagttatatacacaaatagaataatagcataaatatttaaacatatttaaatctgttttataaaaattatacaaatatgattgattttaaaaaaaattattcagatatgtttttaaacagaatctgaatggaatgtttttaggtatcttcaataaaataaaaatattggaaatttaactaaccatagtgtaattccaataattcaaaaatttgcctaactatactttaacaatttattaaacctataaattcaattgaaatttaattttttgtaaatcactaattcttcataaagtaatactgctgtaaccattaaaatattaattaattaaaaaaaataaaacttttcttaatacatttttgtatttttactttaaagtctatatacacttatctactgtatagaaataacgatgcacacatacaaatatatatattattgaagaatattaaatgccaatgcctctatttaataattatgtttgcctgtatatggaatgttactaaatccagtattcattttgaaaggtgaattttcaagatcaaggtctttgaaatatgctctactgggtgtgaaaattcgggtatcgttgttttgttcaacacctacaaataatgggatctctaatggaacaggttttttagaattgggattaaaatcacttttcatcttgtcaaatgttattggtattgtataatctgtattttcacttattttttgaatattattattactagttaccatagtaaggtcaaatggttcattttctttgttcgactccattatattatcatttgattgaaagtattgattattactcttattgttattgctatcaaaatacacagatgtatcattaaaaccatatttatccaattttctatcatttaattcatttaaatttaaatttaaatttaaatttctaatataattctttttgaaaaattccccctgaggtgggatagtagagaccaatggtactggttcatttaatgaatctgttaaattttcatcataagtgtcaataacgtctaagggcgaaatactatgacgtggaccctttaactggtgcaaagagttaaaggaatcattatataatttgaacattggttttgaaacaatggaatcagaatctaaaatatctaattctaaaatagaatcctcagctgttaatagatggttctgataaactccatttctactcttctcagtttgcttaactatcaaatcgtctacatgtttgctaattgtcacatatatgtaatctctaagaccattatgtttcccctctctaattaactcgaaatacacgaaaatacaacaaattaatgcaaagattagctttgccataaagaaagtccaaagaataaaagaaaataaaacaaaagaaagtaatacagcttcttcgtgattcgtgactgcaattgctcttattttatttattaatccttcgaaagtctctaaatcatttaaattcattccattcccattatgaacagtgataaggattgaccacagagtcaatccattaatcacttgtcttggagtatcacaaagaatcaatcctagacaacttttaagttcaaaaaacacaaaaaatgcaaaccactgaaatgtaccatgcgatgaaattttatcaaaaatacaaaacttagaataattggtaattgaaatataatttcttgaaacattattaacgtagcattctgtaatattatgagtttgataaattctaatccctgatattatattccacaatagaagtacaatcgaaaataaaatgcatgcactgaataaccatttagatattctaaaaggcagataaggtttaataacgttattggaccatttattatatgctagtaacttaatacatgtgtaaagatccgatataaaaaatgcaaatttcaaaataacaaaaagccatgttccaaatatataacttaataatgttttaaacgaatagttcctgaataacgactcatcaacgtcagtaaaaagcctttgattgatatgcttcttccaaatgttgcttcccatctacaagctcattcaattcaaataaaacacagctacacactccaataggtaatatagcaataaagcaattaattaaccagttaacggcgtaatgaaccatctaattatagatactgggttaaacagttcatgaaacattgaatcctaaccgcttacaagtcttcgatcagctaaaacaactgatatctaattgaaacttgagataagatttactcacaaaaatattcttatttccttttcctgaaatgcaatttttttttttaaatttttcatttttacaactcttgaaaaaaatttacattctccaaacgatttgaagaatgtaagaaagttaaattctcgagtaatgaaacagtgggaaataaaaactaaaatcgaaaaaatgtatgaaggtaacgaggaggacggggggaggcaaaagcaacattaatggtgatattggaaaatttaagatattcattatgtaatcttattctttggaacatataaaagctatctttttcgtcttattgttgaaattgttattggcgagtcgaattcataaccatatttctaatctcatacataaaactattcctatcttggtttgttaaagtcgaatttgttgtaagaatgtcatgtttattcattatatctggtttatttattccggccacaaaccatgaaccaaccattttgttccatttattctcttcatgatagaatttctctaaggtatacgagtcaataaaatatttatttgtaatattattatcattattgctgttaaaattccacattgatgaagaccttattaatttttgattcattgaactatattctcttggaaaattttttgtaatcttccttgttagaggttcatcctgcctactactatgtgatcgaaggaatatagaactattcttttgttttattgttgacgttggaaaatctggtatgtctacaaaaggatctggttcatctccactaatactcacccatctttgatttttttcatctaaaaccatattatttacaatagttggttttcttgaatgagatcttcttttcaaattttttaaactgtaaatttgatctttattcttagagttcattcttttctttccatggatattcatttcatcaaatctatgcactaaatcatcatcgttgtcatcaatgtttttaatccactggcttgtctgaggattataataaatattttcgtcgtcaacatcgttattattattataatgcttcacacttatagtatcaaggttgtttgaatctattgtttgtttaatagttttaattctggacattgggttcctccttaatctacctgagtcctctcttgcaatactattagagtcttcattactatcatctttcgaaaatgacaatggcttcattctattatgattggataaagtagaaagataatgcggctttagaatattattatcagggaatccatcatctattgtctctttctcatcagaaaacttgttcaaaaaatcttcatctttatctgctcttgatataatgactgtatcattatatttgtctaataattggttataaccatcatatccgtaatttggctcgtcgtctacatattctctaatcggtgaaatgtgtgtggaccctgtattattcagtttagtgacagaggacttaaatctaacagaattcgacctagtaggttgtcttagattatgatatgaaacagagttcttcaatttatcattagaatttaatattatctcgttattttgattcctaacatgtaaatccatcattgattttggatgtttcaaatattgtttctcttgtgataacttattatgaggtaccacattgttgacttgatgtgcaaataaattactcctctttgttggagatcgatcttctctgtgactttgtatcattttatcaaagtattgttgcttggattggaagtcatggtatttattatgagatggattcatagccctatcattttgatcgttttgattccaatagatatctgtagattgatttacaactgctgtagcgtcagagctgattgtggatacagaattggtgcctaagtttggcatggactttctattcaataagtgttttctatggaacaatcgttttgcagcatctttagtatattgagtttcaacgtcttcaaatgatgaatcgttcatttaagatcctcttgcttaaaaaaaaaaaaaaaaagaaaggtttataaaattctctttgtgtatatttgtagaaaataacgtaatttgaattctctgttgttgaatatcaaaccccccctttcagagtgtatatgatccctctttaatcaaaagtacttatttaaaaattaactgtttattattgtgccgatgatctgattccagagattttttgctgtttacattttaaagaaaactaaaaaaaaaaaaaaaattactaaacatcattaagaattcttttgcttaaaaagaaagcaatgcatatataaacgactataaaaaacatgtacttgaaagaatgaacaccaattgattgtggggaatataaataagctctttttgaaaatattcttgtatcagatcctttttccctttttttttctttgctacataaaatattttcagattgctttgagtaaacaaacaaatatagtgattaatattagatggcatcaccttgcaagccaattaatgtcagaccttgacgtactctgactctatttgtaattttattatcaccaaatacttcaagtaacttcaattgtggattctgtttacctaatagttcaatgacttgatcagaaacacaacgaacaaaccccaaatcaatatattgtaatttaggacattccatcaaagcaaaagcctgatctgtcaacaatttcacactattaagatctaatgtaattagtgaattcttggcagaatttaataacaattcctgtattacagggtcttgtaattgaatacaacgtctaatgctaaaagattttaatgaaggcagcgagatttgactcaagaaatatactagtgagtctgtagatagttgatctagttctgcaaggctcaaagtttccaacaaagtgtttacattattatttccagaaagaaatgcacccatcccgttaatgacaaaggaatctgtcaattccaagcaaccatctaatgataagtgttttaaactagaccccacctgacccaaaatattaattataacttcatcacttacatcctcttcattgtatggatactgaatctgtaatgtatggaacgatgagcattgtaaatattgaggtattattgcataatttgatattgaatctaacctggataatccaagagattctaaaacagtctgtgatgtagtcaataaagtaatcaaatttttatcggtaattcggtgtgtatttgatatgtgaaactcctttaacctgctagccattatttcaaaaaatttatcccatgttttttcattgattaaaaatggtccatctaatttcaatgattttaattttgtcaatttctctgccagatagattagtgcttcattatttaattgtccacacatattcaaagtcaaatattctaaatgtggtgaaaagatggcaagtatcttataaccttcatacgatatcttagaacaatcatggaatgttaacgatttcaaatcggtcttcaaaaatagttgtagtgtagtatcatcaagggctctattcttggacaatgccttggctaaggaatccagattctcattggaaataccaccaagattttctcttaattgagtgaatagtggattattgcttgtctctgaagaattcttctcccaggtgacaatattttcagtgattttatttacacataattcctgcaaacttggcaatgtctctgcttttctatccaatagaacctctgctctcttttttctcttacgtctgttctctaagatttgtctatttttgatttttttcaaatccctatcttgtaaattgtctgcactcttagataacacctgtatcttagaactctcttcatcgtattcctcttcatcactatcttcattaaacttatttatttttgtttggtttactaagtccttatcagtttctgtttcttcttcatcactgctactagcactatgaccatcacttgaatcttcgatctcatcatcagacttcgttcttttaataagtgtttcatcatctaccgaattgtctaattgcggttcctggctctcctttctatgaaatctatccttccatctttgtttaatagcctctgcactaataccttcttcttgtaagaattgagttagtgcagaatttggtcctttaattccactcgttctatttctacgtctacttctatacattgacagtttactacacgtaaccaaaaaagtaaattaatccaaagcacttttcctaggtctcaactgtggatttccaaagtattcaataacgttaactaatcgtgttcacaagagaaaatattgttgtttgccagaatctttctttaaaaacacagcgaagggaaatcctcaaaagataaaatacaattaagttatattaaagaaaataaatgatttcttgaagtttgtccagatacaggaggagcacagcttttgtgcattataaactatataatactcaaatagtacgaatggatcaaatcagtaatatgtgtcttgagaaagatcgggatctttcactagtttaatttttttttccttagtaaacccaatcagcatgtaataaataaagtggaaaacgtttagaagccaaggaatacacacacacaaagacaccattctgatgatgtgttttaaacaacatattcacaatgcactggataagccatggataagattgttgaagatactttttttgccgggccagccaccactacaagtagatcgtataatatcatcgagattgatatgttaaactctagttctagttctagttttagctttattctcctagaataatttttaccatcaaacctttgatgatggtaagatagaaaggttcataaagagaagggacaaacatgtacaagcaggagaaaagtaaccaagaaaaaatataataaatgaatacttagatatgagagagagagaaatacacacacacacacacacacatatctatatatatatatatacccttctaaaatgtaaaatattgtgaatgcttcctgattattgttgttcccctatatattatattcttgaaattacacaattaataagaattagccacaataggaagcctacacacaggaaaaacaagaacatagtcttcgactaaacactttataaaatcatcaatctgcagtgacattaggataaggtatgtcacatacataattgtatactaatgccaaataactattccatcttatcacgttttccgttgtggatcgataacaaatataatcccactacagcatctaataattcttgcctctctatatatttggattggctcccttgtttttcatggttcctattattgtagtgactcgtccaacaagttcattctatatttctgtcaccaaaagtaaccttcacctgcaatctaaataagcattttgtaacagacttcatttcactcttcacgggaagttggtattattattatcattattattattttttcacttctctctcgagcaaaacaaaattaaatcaataaagaaaagtgaatgtataagaggaaaggaagaatgaatgaatagaacaaaaaaaaaaagtcacagtgactattaatgttactaacaagttttaaaaaagaaatggaagagaattaacagaagctgttttaatagatatatattgcttcataatattggaaagtttgaacggtaaagatagctttatccgttatttcatttatctttttcttttaagatctcattatgatgaataacagaaataacaagaaactatgcatgatatgtaatgtgaaagaatcaaattataaatgtccaaaatgtggggtattatactgctctttgatatgttataaagatgaaataaaacatgtacataacaaagagacattgaccacaaagccaaccccagagatagataacccaaacaaaagattgcgtaatgatacattcaggaaaatatacgaggaatcaccagaattgcaggatctgttaagatataacacagttaaatttcatttaaataaagtttataaaatcatcactgcaagtaacaatagtgatttaaatactgagaataaaaatcaattggctagtcattatctaaatactttaaggtatggtggtatacattacaatgaagctattgaagaattttgccaagttgcactgtctagattagatgatactcaatgatgaaaggaaaagagagagaaagatgaaagggaggggaggagaaggagaagaaaaagaaggttggagaatatacacaatcagttgcaccatcttaaaaaaacattgatcttttttgaatcaacaataaattgttttatagtaaataaaacaatatgttttgtttttgaattaaaccatggataatcagttcaacaacaaaaaaattaattgtaatttaaacaaatattaaaacataaaaaaaagattcaaacaacatagatttatcttgcaatctattactagtgttgtttttcctttttctggtattaactatacaagattatgttaaattcatattggattttaactagtcatcttgaaataaagaaaaaaacaatattggtaataatttaggtatgaagtaacagtttggtaacagtggttattccccagcaatatatttttgatataaaataaagtaaaatacgaataaatccgataaaatttaacacctataatataaaaaactttgatagacagtgaccagatgaaataagagaggaaaatatcgtcatactttctactttctctttatatgtatttaaaacaatattatatacaaaaatatgaaacaagaataatttaaaaatagaaattaaatgagaaacttctaatccctcttgaggtaacactactagataaatactatgcacgtgttagaataattcgtttgtgcaatttttatttccacatattatatcctttttttttttttttttattaaacgtcagaaagtattatataaagttaaagaaaatatgtaaatatgcatggttatggaaccatccttttgtaaactagttaattaggtttagtagttcataaagatgttttgcctcatctatgcaatagagtggccttattttggacccgaattatcttagtacttgaaattgtacacacacacacacacacacacacacacacacatacatacatacatatatatatatatatatatatatatattatttcaaaagcatattttgtagcaataataaaaatcccactcaatatatagagatacagaaagaatatttcgttatctcttgaaactaacttttttacctataatgatcttcttgtttttcatttttagaaacgtcatatatatatctgcatacaatattcattaggataaataaaggaaaccgaccgtgaattattaatcacgttttatattattctggaatatatcttgaatggtaagaatattcatctattacatatttgctttttactacattcccccctcctcctttctctatccttgagcaaaaaagaaatattgcatcaagcaagtgtggaaaaaaaaagtccatctcccgggggtgagtcgaacacccgatctcaagattacttccaatattacagtcttgcgccttaaaccaacttggctaccgagagaactctgcgacggggtctgttgtagatcaaccttgatattatgattataaaaatattgttagggttttgtgatgattgtcaagaaaagttctagtttggatttataggacttagggtttgttggtaaatcccacatgattgttgaatactatgtaacaaaatgaaacattcatgaaacattaaatagctaattaaggagaaatgtatctacggtgacagtcgttacagaacctcaaataagaaactatcaacccatagttcatatataaaggaccagtatcttggtatctaaatttatatgtttggttgatttataaatatgtagcacattgtataatacaaaaagaacaagcaataatcgtttaattctcctagatatatataacgttcttatatatttgttattgcccttactattcgttcaatagtactgttaaaaaaaattggtcctaagtccaaactataacaggacccaggaacttgagctcgcgtggcgtaatggcaacgcgtctgacttctaatcagaagattctgggttcgacccccagcgtgagtgctctcttccctatcttccatccgtgatagtttaatggtcagaatggacgcttgtcgcgtgtcagatcggggttcaattccccgtcgcggagttttttgcatcaatatgtaatattcttgatattactgtttagggttttgtttaaaaaaatgagggtcgacgatatttttctacactttccgttttgcaaaatttcacaaacatacataaaaacaggagtaaccaacataagtacaagagtgcaaccaagaagaacaacaaccaagcaacgaataagaagaaaagaagaaggaaccaaggattacataaatttagatatatagtatataagtgtatactattaggttatcttagattagggatatagatatacagatatataggaatattacatctagagatatagaacgagtctataccttatatctattcaagtgaaatattattgagatttcaacaagattaactgttatcagaaacatataacctaagggatataatacaattgcaaatatttttccgataaaagatattagataactaattggtcatgaatgttttgtaatagttattttagaaaaaatgtaggtaataaagcacttagacagaaataaattgagtgtgtatatctagatatattagtaaaataatttcatactactgtaattaataacaggtatataatacttgtaattaactatactttcttggataatatagatgttgtaacagtaattttgcttatagattatatcgaattagatggatgaaaatacacaaaaaataatcagtaaagtaaagaccaaacgcaaaaaaaggatatatatatatatattgcatatctctttattactttgtttaattctttttacagtagtctcacaagatatcattatatcttgcagatttttacaccataaataatttttcttccgacaatagcatattgcaaaaatcttataaaataaattgaagaaatatattagatgcatacttgttccttaggttattgaacttatatgctgttattttaaatttaatgaaattcttagcttagaaaaaaaacttcctttattttttttctatattattctttatatttttttatagatacaattcagtatataatttctggttaatatctctcagatagaaaaaattaataattattttgtatattatcttctattccatgcagtttttatttatttatgatatttcttctgtcattaagagttttgggtaatattttgtctataagatataattttttattatgaacctaactatgttgtatagtgttgcaaaataaattttgggagtaactaataaatgaattaaatatcaattcatatataatcatctttttgttttacatcaatatttatttacatattttttgtattatatgtagctacactaaagtttgtcacttttaaatattttacagtattgtttttaggatgtgtttaatatatatatgtagattatttgtaaattataaaatttttttgaagttaataatcattttttagtattatatttttcaagtaagaaaaaaaatttttaatattcttttaacgctttttgattacataatataataagtgtttggatgtgaataattcattttggaatatagattttagctttgctttttaagatatttttttttaaaaaaatttcttatttgtttattttttaaccctcaagtttatcttttaataagcgtctcatttgttactaaacaattaatttttacaaaggaaaacgattatatttttaaagatgtacttaagtaaaaacaaagaccgacaaacataaagtaaaacaatattcactaacactttcctaacgaattacaggtattttacagtgcttatggttactagaaaagaatattctaaaatgaataagggaccaattaaatttcaatatacataaacccataataattttgtctcatgttttcgtccttttaaactttttatatatcatcatctttgtattgtacatgtagaaggagatctataaattatcatataatttttatatcatataaatatataataataataataataaagaatgtatatgctggaatgatatattactggtttgagtaacatgtaaatatatcaaagaggaaaaatgtttgttttgcacattcaatattacggagataagatcaaacagaatcgaaataaattaatatattatgaaaaattgtcaaaaggtaaatatatataagtagacgattttacttattaattttccaatccggatgaataagttatatacattttatcatatgtatctttttgtatttacataattattaattcccaatcaaaagatggagtgaaaattactctacatatcaacataataataatacataataataacatataatatgagcaccgacgctaagaacatgtatactaatattattcatccagaggaatatattacaatgttaaattagtacaggtactgatttttaacaacatatttaaaaagagcaacattccaaattatgataaaagttaacagatttttctttttactaatcaatataaaaaaaagataaaagacagtaaaaattactcaaataaataaaaaactaagaaaactaaacaattactacatttgcaactataaaatgacaaaaaacaattcaatctcattctttgatttttattgcctttgaaatttatgcctgtcaaaattaaaactgaagttaaaattcaacaatattaaaagatattatttttattaaacacagaagaaaaaaaaggtaatttttagattacaaaacaacaaagataatccttttaaactttactaactctaattaaacaaatataaacaacctttcaaatattaagtaatatatcaattcaattaatatactactaaaaacaaaaatgaaaaaaaaaaatgaaaattcgctaatagaagtgcaaaatgttatagtacaagtttttatattttcatattttttatatattctaacaaccgcttataattatcctttgaaaattaaaactttgtatatttatccatgttctattaactttagaccaaaactatacaagtttattataggaaaatttttatgggatatataaaggacagattttttaataattttctttatcaagaagtatcacgatgggttcacagaagtgataatataatatcataaatatagcattaaaaaaaataactttcaaattatccactataacttcattattttcaactaatataacatcatattacaactcatataacaagaagaaaactgacatttcttctattcttggttcaaatctttaatatgttaataatagttaactgtagtgatatcaaatgtctaatcaataataaactatactataacgtaacgaatgtattcccttgctatccataaaagtgtataaataaactagtattctatccaaaataacctatttcagacccttctcaatttaaaaaatatataaaaatatatatcaaatatcaaaaaaccctaactttttctatacaaaaactaataaaatttttataaaatccagtattatccaaaaaaaaagtttttctgctttcttcttctacaaaaatgaaaaaaacaaaaaaatcataatttttaaaagaagttcttctattattactaaattttcaaaaatcaaaaaaaaataattgaaatcatctgatgtttattatgaaagaaagctcaccttacctcacctcacctcatattattataagcaccaaaaacataggacagaaattcacagattgaaaccacaagaagtacatattaaacaaaaatgtttgatataccgttaaatacttcaacatatgtcaacaaacatcgagtgagagaaagacaattacgatacagatatatcaatgaacataccaaacaatacaagaaatataaaagacatgtctataaaaagaaagtattgagaagaaaatattcagataagaagtatgggtcttccttggatgaaaattttaataatagtgataataataataataataataataataatcaccctgaaaataaagaatatttgattgctagaagaaataaaaagaagaccaaatggactacagtttatagacaagatactcaagagttggaaagtgaaaataatgcatttggatctacaaaatatgaggaagatagtgatatatctgaaacagaagataccaataatgctaacattaatgatactgatgaggatgctcgaataaaacttgagaaaaatgattatgacaacgatgatgataataataatttagatgaagaagaagctttcatatcaagtaaggatgagagaaagtatttttctcgccaccataaaccacagcagacatatgagttatggatagatccaaatactacaacccatagaccattacaaaccaatataataaggtttccagaatggtcaaagatagaaaccaggactaaatcaaaattaaaagagcctctagcacaaacaactcatagtctaaaggcatatcaaaaactgatcccatatggtttatatttgcatgatccacataatataagaagctatcataaaagacctactatacaagacaaacatatagagacaatggttattttactccgtatccatatatcaaagctaaattggtcaatggcatacagaatatttgctttactgatcaggataccgcgtgttgatatcaggtctatttggcaatatggtgtggcgattttaaatcagagtgagaatctgatacaatgtctaactttcttggaatggatgcacagtgtattttcctcaaagaaagcttaccatcttactaatttattacaatctgatcctgtgttcagaggctcttcacgtaaccatacagcacagttctcacttacatggttatggaactctttaatattttattctaccaaaggtgatcaaacaagaagaaacaaacatgattatgaaaaaggtaatatgagaataaaagaagaagatggcgaatatgatgagcattttcttaataaatatgataaagagggtatggaaagattgattgagaaaataactgaaatgattttaagcccaccgtttatggaggatggtgaggtatggtttattcttgcgatgtgtcatatgatgagagctgattatacatcattatgttatttaaatagacgtggtggacaaccgtcatatgaaagagaaaaattgtatgatcaggtgacttatgatattaataaagtgataaaatatttaaaggaatctaaatcaagacaaaatggtgattttttatatccaaatgattatataatgaggagtctaacacagatagaattacgtgtatcggaagaagaagaagaagaagatgatgatgatgatgatgaggaggaggaaaaagaagctagtttgagtgatgacactaataagcctacacacatgtctctaactaataaaagaaaagaaataaaagaaaacaataggtatcaacttgtatcacaagcaataaatgagtcagatctacgacctgaattagactctagtttattccaagttgaagaagaaaatagtttcttgcaaactctagacatgcctgattatttacttgaagatgattataataatcaatataatgcccatgataatttttatacaaatagagatagtgatgatagagaatattcaagtgattgaactgttttagtaacgaaataagacataagaatttccagcttgctaataccgtttttctactcttttcttttcttttcttttcttatttttttatagcctaactacaactactaattcgtctatatagcagtgaactgataatataagttttcctgttttaaaccaaatctgaattgaatcaatattcaaatgacaaagaaaaaaaacttctatctacctctttatccaagctgttactatttttttttgctaaacaggaataattgtcgcaaaacaagggtttgtaaatatttttgttatctattgaattattcgaataaaaatacttagggtttctcaagaaatttcaacttttaccattgcgattttccctcttctccttttcttgcaatggaaaacaggaaaagaaatttttttctgctattgtttttcaaacgactcttcttagcaataattacctattctggtaacatacttccacttttgggcagtccactcacaaaaggggctttggaaaccctaatgtacgcccgcttttttttttattgtgttctattgtcatcaacgcacttgatttccgttttgggcaaaaaacaataaaaaagggggcgtcttcaattgaatgaaatccaaatctttttgcaaaaaatgaaaaaaaaataaaaaatctcattttatttcaaaatggctctactggcattttccaatctgcatatttttttttttatatatacgctttcccttacttgctttgaacaattcacatgagtaaagtcatcaccttttgatttatttagacttccagcttttctttcttttttcttttttcttttttttattttttccagctttataacctctattgacaacttttatacaagtgttgaattctcttctacttctcctttcaactgggaatctttatagaacttctataagttgaaacgcaactatttgctcttttcttcttcttctctttccttttccttttcctttttttttttaatactctctttcccacaactctaatcgtagttcagctaaaagcatcatttaattttatctccctgtcctatttcgcttctttctaaactgtgaaatatccaatttatcatatacaagatacaagcatctatcttttaaaaaaaaaattactttttttcttttagttttctgaactgttaatatagtacatattacttcattatccaaacaccatacatacttatctcttttctcttttttctctttttttcgtcaattctaaaatacgatggtgaatatcagtgaatggagcttattagcagtggtttcgttacttgtgtcaacaggtgacgcttggtctcctaccaatggatatgtaccagctaacgtcacctgtccagatgatatcaatttagtaagaaatgccacttttcgactatccaataatgaaactgaatggttgaagaaaagagaagtccacacttctgaagcattaaaagactttttgactagatcattagcaaatttctctgatacctctatcctagacgatttgttcggtggaaattccactaaaatacctaaacttggtattgctgcctccggtggtgggtatcgtgctatgctaagtggcgcagggatgatcgctgcaatggataatagaactataggtgctaacgaacatggtctaggtggcttgctacaaagtgctacctatctggctgggttgtccggtggtaattggttgaccgggactttagcttggaataactggacttcagttcaagatatcgtaaacaacttcactgtggacggatccatctgggatatcgaccattccattgtcaacccaggtgggatcaatgtcttcaaatcagggtctcgttgggatcacatatccgatgctgtagaagacaaacaaaaggctggcttcaacgtctcccttgcagatgtatggggtcgtgctttatcttacaactggttcccaaatctttaccgtggtggtattggttacacgtggtctactttgcgtgacgccgaggttttccaagacggtgctatgcccttcccaatctctgtggcagatggtagataccctggtactaaggttattaatctaaatgcaactcttttcgaattcaatccatttgaaatgggctcctgggacccaactgtcaacagcttcactgatgttaaatatctaggtactaatgtctctaatggtaagcctgtaaacattgggaaatgtattgcaggttttgataacactgggttcattattgccacttcatccactttgttcaaccaattcttattaagaatcaatggcactaagttacccaaatttatcgtccacctagctacccattttttaacagatttatccaatgactataacgatattgcaatctattcaccaaacccattcaaggatactgaattccaaatgggtaatgcttcaaagagtatctcggaatctcgtgacctattcttagttgacggtggtgaagataatcagaacattccattaaacccattaatccaaaagcaacgtgatttagatattgtttttgcattggacaactctgcagatactaaccagtcttggccagacggtgcatctttagtcaacacataccaacgtcaattctcaagtcaggggaaacacgctgcattcccatatgttccagatgtcaacacttttgttaatttgggattaaacaaaaaaccaactttctttggttgtgatgctaacaatttaactgatttagcatatatcccaccattaattgtctatattccaaatgccaagtattcatttaacagtaaccaatctacttttaagatgtcctattcagcaaaacaacgtagagccatgattcaaaatgggtttgaagctgctactagaaacaatttcactgacgactccaatttcattggttgtattggttgtgccatcataagacgtaaacaacaagcatttaattacactctaccaaaagaatgtgacaaatgtttctctgattactgttggaatggtactttgaacacaactgctgcatatggtgttgttggtgctgccgctgttgaatcagcccaattatcttctgcagaggcatctctagctagtgcatcatcagcttcagcaagtgccactaaaaataaagatggtgcaactaccactttgtcttctacatccaagaaaaatgatgcacctggtaacttcccatctaacggtatttttactctattaagtgttattgccactgttttgggtttattataaacattcaatttttctgaaggatattattcattttttttttccttagaaatttactgagatctctttctcttttttatttttcttctttactgtttattttctttgttcatttacctattaatttacttctatctctttttatgaattatttccatattttgttttcttaatcctaacgaatttatgaatttatgaatttgtgaatttgtcaattataatatatatatatatattatttgaatctatgactctctcctcatacatatatacaacttatctacacatataatatcaacttattttgtatatttagtctttcttcttttacagaatctcaatctgaagattgtgaacgaatcaaaaaaacttatcgatgagtagatatataaagtagaaaaacacctaaaacaatatcatactgtatatatgatcaccgacatacacagatatattcaatctcttattcttgcgtaacctttagtaatcacattgtgaacaccattacgtctgttttctaatgcaaataacaggtctctcatgacaattccaggctcttctctagcttctctaaacctaagaccactttcaccacgggcggcaatctcgtttgcaatttttcctgctgattttattgtggacgtagttggctttgctacagacgcagttaaccagccatattgtttcttactacccgctcttaatccggcagtaacatttgaagctctatgtaaagtctcctcagaatccactttattctcaagatcctccttctctaaacctaaagcaattctcttcttcagtcttctctcttcctctttcttctgcgattgtgcaatagatttcaatgcaatagccacttcactacgtcttcctgtattcaattgtacaccacgacgacgatgtcgtgagataattaatgcattagttattatatctctcatatacgtttcacatgaagtagagaccatattgaggatctctccattatttttagtcaaattcttcaaataattatggtcaaaatgatgttctttactaacacgtttcataaatttagataattgatcaggatgtaaaaatggcaaatgaggtggaactgttgttgagttatgcgaagtattaccaccagtatttgaattacttttggcttgattccttgttgcagtgaccgacccagtcaataaagcttcttcctctcttatatctacacctgcagagagcagaacatcttgcatcttatttgggtccgtctgagttttattacttactgatttattactgttggtaccattgttactattactattattattattattattattattagtggtattattgtttttgttgctgcctgtattactattttttgtattagtggtagatgttgatgatgacgacgatgtagtcgtaataggtttcttatcttggttcggcagagttgatgattttgtagtggtggctgccgtggtgctagtattattactgacagtagtattagtagcagtattagtagggctagtagtcgtagcagctgcggtagtagatgaactaatggtgtttgtagtatcttcctgttttattttagtatttttatcatttgaagacattttaattaaatatttctaaacttgttgacaatctttgatgacttattcctatgtggcaatattaagtggtgataacaactaatgaataaactatactagtatctatgctaatgatatgctatgtattgttatttattttgtgtatgtcttgtacgtattatattggctctttttctctcctttgaacaattcattaatcgtaaaacaaaaaaaaaagaaaataacataaaataaaaagaaaaaaattacacaagaagaaaagagcaaaaaaaaataaataaaagaaaactacgacatcaaaaacatagcaaagttataggaaacaacttcattgatgaagagagtaaagcaatttgataaaaccatagttctagctgataattcgtcccatagacagaagcatggaccaataaaattattacaagacgattagcaacagatatataatccagtgacttgatgcttgtaactcatcttttcaaggaatgtattaaataaacacatgtctatatacatatataatattgtatatatcgttacccaatttttaacaaatgtattatgaaaacaggaaacaaatgatcagttttgtctcttatcaggctcatctaattgttgcgcagtggattgaccatctttatgaattaaagagtcttggaaaatccaccctaaacctagcgttaaaccaagaatgctcaatagataacttcttccctttgttctattagttggatcagacaatttggatttattaatgttgagagaactgtcgtttgtggagcctattacggaacttgtttgtgtggcttttatctcatctgctttttcagtggctgcttctaattcggaagtgattatcttttgtaatctttctacttgaacatgtgcagtgtccaattcttttttcaatgattccacattctcacagccttcctccagatctattcctttatggtgactcttttcatttaacaatggctcatatgtaatatctccaccatctttatttagaatatcagtaatgtctttatccattttcttagtgaaagatttcaatgaatctaacttttgttgaacctcttttaattcgtctatcatagtgttaacttccttggaatcttcttctaaatgatgtttgtccaattgtgactcttcatggagtgatacctcataacttacgtcatcaatctgtttttcaaccctttgcacctgtaatttcgcttcatttatttgattcttcatatcaattaagtcattctcgtcaataacatcaaaattcacattagtaccactatctgtcactttcatgtcatggctttggatcctttcttgtaactcatgttttctgcctgacactttcaatcctcttttacgacactcctcctttaaattctttaatgtcatacgatttatctgcaagtccaatctattaactgtttgagtgaaatttctttttgtaatgatcatcatggttggaaccaccagttttgttagacttgactggattccatatttcaatattacacttggtaaagccatatttgatagtacaacctgtatccttatttttttttccttcttcttcttaatgccttctcctgctacttctgtgtctataattgtcttagtcgatattgatgacctctccttatcttaacagggaatgtaatacgatggtgcatacgttgtactctttcctgttctcccttatatatccagtgattatttacacgtaaggggtgtatctcgagatgccaaatcacaagaattggaccaacatctagttcatcagcatcgacaacagtgtctcagtgtctctgttgtgtttatttatttgtcattgaatggtgatctcgaggaatttcgttgggctttttagattttccttctctgcgaataaacaaaaaaacaaaaataaaaacaaatcacagatctatagatcagaagatagaaaagaacacccaatataacagcactaaatggcataaaacacacacacagagatgtatacatgaagacctgtttgcaggatgtgtttacttcaataaggagaccctttgcctgtctgtgtcgtggtgattgaaaaaattagatagatgggcacgaatcttcattttacagatacagatacaaaagaatacataaaactatttatagtatatatataagtggatgagtgtatgtgtttatatggtatttttttttcttaataaaagaagaataaaaaaaaagaaacagctgtctaagaatatatctttgccctttttaacccatatatatatatatatgtatatatatagaataacaaaatgaccacaactataacaacaaagaaaaaacaaaaacaaaaacacatgatagaaaggagaaattagtattgcctagcggcctcttgacatgcttttaattgttgtaaatagtaatcacagggactcaattcaccattatgttcatcaagacaccttgtaaaatttctagcatcgatttcacatggacctgctgtggttctttgagtttcctggactattggttgttgttgtaattgggcttgatactggtttgcctgctgtgctgcatcactactaccaccaccggagaatagaccagtgatacctgcaccaatagtgtgaccaactgcactgcctacagccacaccggccgcagtagaagccatctgactgaacagaccaggttgactaggagcagccgaagtggcagcaactgtcgaaggtggaggtggaggtggtctatgtgtttgaataggcactgactgagttggtgcaggggcagccatagtggagttttgtctagcacccataggtcttctactgcctaacataccaccaccggtagaacttctagaacctcttctggtacgtgccattttctcttcttttcttttcttttcttttttttttttttgtctgatttgttgtaacgttatttgaactgtataaactgattttagtatattataaataaatcaattccaataataatattttattgggatcaatgctgatctgtgttatattgaatctagcaaatgtagttagttaagtaagtaagatgactggcactatccttctttttctctctttctcctcactttctacacaggcgttcattacaagtgacatatatatagagaaaaagaagaaaagagagagggaggtgcacaaggtgaataaaactgatctgatggtggcaaacgttcccgcagcgtcttacttcattccctcacacctcgagggcatcttctttgattgtgatgtttctccagctcttaaaatcgaaaaatttcttttgccaaaattgagccacttgaaccaataaaaactaagaattcgtggactccgagaaaaaaaaatagaaacacatacaatttacgaatagcaaatattattatatatatgtaagtataaagataatagcaacaatcctctgatgaactcactaatagagcattcacagacattatacacttgagtgcacgtgtgtacttacatgtttacgtctttgctgtatcccagctctatccatttgtccatatgtatgtgtgtgtctatgcatatatttatatatatatgtatctatatctatatatatatatatatacatatatatgtctatctacttatgcatatgtgggtttagaaacgccaactctcatcaactgattcgatcgcccatttaaatttgtctcgaagtgtcttagggaatatcttttctatagggacgttatatttcttgcaaaagacaactgataatcttggatctatataattgatctttgatgttcctagagatacttcagaattttcctctttatcttgtagttggatcgaactaactctgattctttgttccaatttttctatttgtttctcacatttctctaccgtattataacgtgatttcaactctactacaccagtctctaattctcttttatattgaagacgcaattgctcaactttatctaaccattctttcaaagtctcttctgataataattcttcaccctcaaagtttcttttatcattatcacgagcaaatttaatctcagatttctctctttcacgcttaatgattcggtcatgaatctgtgcctcttgttccttagtgatttctttaatttccttgaaaaatttcgtccttcttttcaatgttggatcgatttgtaacatagccttcttgaatctaatcttttgccatttcaattcttcaatctttaaatttgcacgttccactgcttgtgcatggccctttgtcactgatctttgatggttacaaagaatggccactgtacgattggctgcattataccttaatagtttttctgctatagtacctttatttggtatcaaatctaattgatcttgcatcgtcttcgatgcattatacgtacggaacacttttgctgtcaaaccaggcatatagttttgtaaatatttatttagtatagatggatccaatctatcaaacaactgatgtcctggctgttttggcggtcttttaaagatcattaagtctttgaaaacctgtttgtctacttccacttcttggtagaatctaatcgaatccttacccaaaaaatcaaatattactgtatttggtggttttaatgtaacatgttcatatctcaaagaacaacaaccaactgtgtccgcctcatcttcggatttctcaccaccggctcttaatgcaaaaacatcaataagatatgtggctactgccttttgtctctctaacatgagtttactctttagattacgtctataatcctttctaattatatcaatgtaagatttcagttctcttgctttttcaaattttttaaagtcactttgaccctttaatgatgaattagctgctaacctaacatatttatgtgacccaaatatattttctttccacatggctagccattgaaccgtattatcatgtctaacttccccccatttatgccctgctggtggatcaggaataggtgcgtcctcactaagattcaaagtgatatcttccggatatactcttctctttaacttccctgttttagggtgtgcaccacgtcctctaaataaatcaggtggttccactctgaaattaccaacctgttcccttctaccatctaactcgcaaaacctataaggttcctctagtttcgccctttccaatctattctgtttcctctcctgcaatgacaattttttcttttcttctctcttcaattcaaaatatttatgcatctttgtaaaatcacatttatcaaaagtgttaatcttaataccatttaaagtaccaccgttttcttctaacacttgtttaaaatcatggaagaagtttttttggaatactgggtttttaccatggtcggtttctaataaagctgcatagaaacctgccacttcttcagcctcaagaggtaaatctacaggcttgccatcataatataatttaacatgagatggtaatggctcgtaatcagggggaaacatcacaccattatgtttcaaactatgccatttaatctcatcattattattttgattctcccaccatttgtattcttcttcttcttcttcttcttcttcttcttcttctttctcctcctctttttctttttcttcttcttgcgacaattctgttttcttaactgtttctttcttcttcttttgtttcttctctaatttaattttttttaatgatgtatcactatctatatccttgtcttgtaatttattattttctactgaattaatttttcttttcttcttattcttcttcttcttttctttggagatagctgacagtgatccattgctattatattctactttcaatacatcaaatgattccatatttgaatgatccctttgaacgtctttgaaacttgtcatttctttctttacttttggttcatcattagatggttctgacaatgtctgtttcaagaccagttccttctgttttataacagatgtctgagataatggaagatcgtcatcacttgaatcagattctgaagtagaccctagacctgaattttgactcactagtttatcccaactggaaacggtcatcataaatgaaccaagtgtctggctatctaataaaagatcaatgtgtattctaatatattggatatatacagttaattaaaaccgccgaaactctagagagaatgaaccatgcagaaacaaatctcacggattcggttctgttcaaatacagatacactttgagccctacataactgatcaagataaaatgagaaatatgtgtaatgatttgctttcacaaagaaaaatggcagtgtcactatttaaattctttatctcatcggttcttaaaaaatttttcaattttccttattgagtaattgggtctctgctacatatagccgtgaataaaggggagaaaaaaaaaagaacttcaacaagattcttcgaggttgaaagaatttgattttagaatatcatatagaaaagcatattatattgcacggcacaggattatatatatatagaaaacatgagaactttagggttgatcttgtatcccattagaaagttgaaatttagatctgctggattaatatgttaccggtttgagtaacatgtaaatatatcaaagaggaaaaatgtttgttttgcacattcaatattacggagataagatcaaacagaatcgaaataaattaatatattatgaaaaattgtcaaaaggtaaatatatataagtagacgactttacttattaatttcccaatctggataaataagttatatacactttatcatatgtttcttttgtatttatataattattaattccgaatcaaaagatcgagggaaaattacactacatctcaatataataataatacataataataacatacaatatgatcaccgacgctaagaacatgtatactaatattattcatccagaggaagatcaatgttttttctgaaatgaagttggtttgaatgttctgcacatgtattcttgtattttcgttcatgttcaatatttactttcataaccaatggattgaaattgtcaactatattttgtttattacactatattttatacatttgtgtaaatatttctgtatatattgtactgtttttttttttattcttagtttttttatgtataaattatgacaaatattcagaataaattcaactattgaaatgctaagatctattcaaaaagaaaaagaaaaaaaggaaaaaaaagagaaataaatgcaaattcttttcttaccctaaaaaatattgtactatttgtttttttctttgaatttattcatgcaaccctctcttttgttcttctaatcaaaagagaaatacatccaaaaaatgtccaagaaaatatttttaatttttgtgtaatctttgttctaaaaaaacaaaaaaaaaaaaaaaaaaacagagaaagagagagaatagaaaaaaaaattgcatattgcttatataccaggaaaggcagatccagaagaagtcctgttatctgtcatagattatgatttgtaggtcaggtgtatttatcattatcttggtcaaaaaaaaaaaaatttcttatagtataaattattctaaataaaatctcggagtaaatttttatatatatgtaataatatatggatataaattttgaaaaatccaatacatattgatttataaattatattacctaattatcaactatagaaacagtttcaatgctctctgctggtttagcaaaagggtttttttttgaaaaagaatcttttgaattgaaaagtatcattgaatccttgataacaggtgtcaccacaggagatactaattgtgtattttttgcatctcttgatctttcactctgattcttttgaacataccatgattcaatatgctttttttctctttcttgctgctgctgttgtcttgacataaattctgatgggacatcaaagtctgggggcactcttctattggtagcacatttcaatttcctataagccattattgtattggctttctcgataccaaacttttgttttagttttctatagaataatccacaagcattgcatatttttcgttcactaccataaggacctgatctccattcaggcgttttttctacactcaaacagtgagaacatggtttcccatccatttcatgatttcttttaatattactaaagttgttacctactttttgagtaattttcttcttgcaaatcattttgttattcaatttgaaatttgttgatagatttactcttggtatatttatatcatgatcttgattactaataatatttggttttgatgttaccacatttaccgaatgaacagtctccaactttttttttggaatataataattatcgtttttattaccatttttataattaactgtgaatggtaatgtaagagaattaatgtgattaaaatttttattatcaatactgctgttactcatgattttttttttggtttcatggcaaacattaattaatcgttggctcaactgatttaattcatgtatattattttggtggtaagattgataccatttcattgaattttgccttttcaaactttgaaagacattgttaatattattatttatatgatctatttttgaaagaaattcaatagcctctgattccgtatcggaatttttattaaattctaaatgttgtggggaaggataggaataagaagatgattttgttattttatcatttaaatagctattgcagtgtttaaaatgtgaattgattgatggaattagtacagtgggtaaaactagtttgtgcgattgctgttgttgcattttttgtacctgttgtgcttgttgtacttgttgtccacttgtgtttacttcatccattgcgtttaacaacagatgtattgacatcttataattattaccattatagttattatgtctagtactgttattgttttgattaattaaggacattggattcatatgagttgttttgtttccttttttttttatcttttttaatgattatttgtgtatacttctatgtttatgtttttacctataaatatatgttttgttcaagtttaacaaaactgaaactaaaaagatgtagatagatataatctttttcttttaatttccaaagttccagatactttatatatcatataagtataactgtttgtttttattagaaatatacaatactataatatattttatttaatatgtaaaaaaaatctattgcttgaattaccttcctattgtgtcatattgattaattttaaccttaaattatgttatatttcattgctcgaactttcataaacatttaatttttttgaatccattcctcccaaattcgtcgacaaataactttagtgttatctatttacttaactatttattattaatattaaacaattttttaagttctttgcttttattaagaaacttcgacctgttttcccctctttactattattattctcattttgaagggactaagcttttattcagttataaaactattgcttttattatcaacatatttttttcttttaaaaaaaaaatccattttataatatttctattgctttaaaaattattcttgactatattctccccctctagacttgactaaaggatatatatatatatatatgtgtatgtatgtgtaaacctatatttgttttaagtggcttttttttgtgatatatctatataattcacttatcagataaagggaagaatgaaaagatgtaaaaggagacaattatttactttcctattctttaaataatgtttttcttaactttttgttcaattggacttttttttttgtttcctataaatatagcaagttctacagagatcgataacatagcaaatgaaattgtattacaaagtcaaactgaatttgacattaataccctctgggaaaagatagatattttacaaagggatattaataattatcaagatactatcctgtcaaccttggcatcagataaaacagaggtcgaatctaccatcttaatagattcaaacacttcaaaaacaaaatcatttaaaggtaaattatccttaatacctttgcgaaaagacacaatggaatcattgctacctaacttagccattgatgtagctaaattatatagcaagtatggaattttctacgttaaagttgaaacagtttgagtcgtgattaagatcacaccatttacttgtatcatataaagatttaatatatgttcgtatgtatatatttaattattataaagcatattagaaggattctgggtttacatatcttaacagcaaccacgcatattcatcatgcacatataaacacagaggaaaaaaatttccttcttactttaacttggtaaaacaatcttaaaaaaaacaataacacattataatattgtagatatcaaagatttaactggatgtgtatataacaaacattatcatgcataaatacacatgaatatatgcatgtatgtatgtatatatgcacacacagcaaaagagaaaagattattgattattcagtgagggtgaaaattcaaaaaaaaaaatgtagaaagaagaaatattaaagatagacttgatttctttttaaagaaagggttgatattcgattaaagttagtgattgcaattcaatatattaatctagattatatatatatatatattttgataaagtgagaagtaaactaagatataccgagaaagaagacacattttagaataataatcatgtccacacgaaaaaaaaatatattgaaagttatcatattaggcgattcaggtgtagggaagacttctttaatgcatcgttatgtgaacaataaatattcacaacaatataaagccacaattggcgcagattttttgacgaaggaggtcgatgtagatgacaaagtggcaaccatgcaggtttgggatactgcaggacaagaaagatttcaatctttgggtgttgcattctataggggggcggactgctgtgtgttagtgtatgatgttactaacaccaaatcatttgaaaacattaagacttggagagatgaattcttagtacatgctaacgtatcatcacctgaaacttttccgtttgttattttgggtaataaaatagattgtgaagagaataagaaagttgttaatacaaagagtgctcaggaattggctcaatcgttaggtaatgtccctttgtttttcactagtgccaaagatgcaattaatgtagataatgcttttgaagagattgcccgaaatgctttacaacaaaatcaaaatgatgcagatgcttttgaagatgattttaatgatgctattaatattcaattagatggtgagcctaactcttgcagttgttgataattacaacttcatatatatatatatatacatatatatgcatatatatgcaatccaaactcgtattctattaattggtccgtcccctttcttctttgaatcaaagtatcttcccatcattactgaagtatgtcataccctttaatgtagcatgatacaatttaattaatttatttctacatacatatatatatatgtatctgatgtataaaatatagtctatctcttaaatgaaacattcctacccttggtaatatttttccttttcttagctgctttaacggtctcatgaatttgagaaaatggatcgaattttcttttcttcttcttgctattgtcatcttcctcagaaaccctctttgaactaagaactttcttctcttttgaatagtcaataatcttgataggttcttcattttcactcttatgttcatttttcttccttgaatttgtagaatctcttttaaccttctttaatactactatctcattcatatcctctttctcttctgtcacaatcgatggtatcacatcaatattagtggaggattcaatagcagaagtatcagttgtagcaaacgacatttcttcatttggaactggaatggtatattcaactttgtttgattcatctatcagtttaataaatgcttcatggcgtgactgtaagacagtttcaggtactatctttggattattttctttataggatatgatatgcttattattggtcaattgacctaaaaatttagactgattcatcccaattatgtctttattatctttagttttttctatagcctcttctgaatattttttttctaagccattgaactgtacaaacatatttcttacttgtgaaagtgttaaaatatcggttttagtaacttgatcaggtactattgaaatattgttcatagaagttatgcttgaattattattattgcttttcacacttgttaagtaatttttaatcatgttagcaatttgtttggagtttgatctaacagtatcagtaataaatgtgttaacagagacaactccagcagcatctattggagtatatgctaccaaagatattaataattgatttggcattatgtatcttggtgattcatcatcccttcttgccattgtatctctccagatatataattctttcaccaattgctctttctctaatgggacattatactggtacattaaagtcctccaaggatctatcttttcaatcggactataaactgttggtatattgatcttgggtctatatttagagtattcaaatcttctttttgcgacttctcttgattctttaagcacagaagctaatttattttgtttaatcaactcatttcttaattgatcgaagatgttcaaaaggaaatgtgtatcagcacgtgcatatgctaacaaaggtttgctcaatggtcttcttctccaatcagctagttgatattttttagatgttttaaaattgacaaatgtttctaataaatatgccaaactatgtttagggaagcccaaagcctttgacgcatgataagtgtcaaataaacttacaatgtaaagacccaaatctctttgtaaccagataatgtccataaaggcaccatgaaacactttagtgatcattggatttgtaaaaattttatttagtggggacaagtcatctcttagagcgattgtatcgattaaataatccttatctctggtactaatttgcattaaacagacgataccatagtaggatctaaaatcgtgatgttctaaatcgatagctagttctttataattagatagatcctggaccaaatgagggatttggtctacttgatcaatccaaatgggttctgtgtcgttccatgatttaaatgggattgggtctttaatcacgaggatatcatgattatattcttggttttcaatttcgtattgataaggctgagggtagtgagatggaatgttgccatttgtgtcttcatctactaattttaaacattcttctaatggttttaaagcatttggtttctgtatcaataacggtttgaatggatgggattcactattgtccactggttttttaaaagttaattgtggtttcgagattcttttattatcaaaatgatcatttgtatcatttatattttcttctagatattgaaattgagaaccatcatttaatttgttaaaattcttactgttgttgttgttgtggtggtggttgttaattccatgactattattaaggatatcgatggatctatctgctctttcaaataaattatcgatgaaattagtgtagtctctccaatcttgaccttccaattgatctttaccagattcaatggtaggagcatgttcatcaatagagaaaatgatagaattgatcatgtctaagagatcattttttaaatgatcgacagaatttgcaatgtctttgtctaaagtactataaaactctatatcttgagcagccaaagcattagatgctctaaccgttcctacaactttagagagcacctcttttgtattgtcgttgttattcacttgttctttactggacatgactattagctacttcagtagtttgaatgtggttaagaaagggcaaatatgttaataaaaccctttttttccctaataatataacgtttttgttcaaactggcaggggtggagactcactttactttactttactttaccttgcttcacctcattcccatcttatctcacctcatctcctctcatctttttaatcttctctctctctctatagtttgtactcttttgaaaaaaaaaaaatttttttcctttcccctcagtaaaatcgaaaactgaaaaaaaaaaaaagaacacaacacaaatagaaaaatcttcacaaaagcggaatttgattcctctttcggaataacacaagggatttaaagggaaaaagcgggaagtgcggaataattccgaaattctacaggattattccgtgacattccgtccactgcctttctttttgtacttctcagctaataatcataataacagcaataatacacttacatgaaacaaagaatatgataaaggtagtcgtttgagttacacattcacagatatccacatatattttccagcaaagacagctgtcttttcagctgaaacaactaaaaaatcagaaaaaaaatcaaaaaaaaaaatcaaaaaaaaaaatcaaaaaaaaaaaaataaaacaggaaaaagaaggaatttgagacgcgaaatgttctgatctgtgctttctatgttgttgttgttgttgttgttttttgttttagatttttagtattttcgtgtcactttgcaaatttaaacctttttatttaaaaattaaaagaaaaaaaaaaaataaacaaataaacaaacaaaaacatgagtagagggtttgataaaaattgaaattgagaagagatgaagacatcttggttcctggtttatgtattttttttttacattatttgtttgctctatcaggttttgatacaataagttgacacaaatagaattcaaggttttttttactgccagcacttttaacttttgctttactttttctctctatcattatttctcttgttttgtatctttttatactggttgttgatcaaccagcatatattctcaaattataatcattagttataatcactactacaatagtagaaaaagacaagtattcaattgatacatataattatcctttccttacctaccatccatctttttacacttttgaatattttttttgttcatgccatcttcattggcacaaagtgctgcaactaatgccatgaaaaaagtcgttaataatcaacataatcgttatcatcatccttacaataatcctaataaattaaaaactatgcattcattgaaaaatgggaataaaaaaattcatattgatagaatcatagaatctgtcactgatgcaaagaaaagattatctcatactgaatccttattaagcaacactaatacaatatctaccgatattactaccactactactgttacttctacaacaacaacaacaaccactgccaaaaaaaataatagtaacaataacaataataagaataacaccaatagtgataatgctactaaatcctctaaaagaaaatctagagatactgtgggaccctggaaattaggtaaaactttaggtaaaggttcttcaggtcgagtaagattggctaagaatatagagacaggccagttggctgccattaaaattgtctccaagaaaaaatatatgagagtaacgtataataataataataataatagtagtagtagtagtagtagtagtaaggacaacaacaacaagactaataataaccagtcaaaccctaatatacaacagaaccaaactaataatgccgctatgccagttaatccatatggtattgagcgtgagattgttattatgaagttaatatcacatgaaaatgtcatgggtctatacgaagtatgggaaaataaaaatgaactatttttggtgttagaatatgtagatggtggtgaattattcgactatttggtgtctaaaggtaaactacccgaatctgaagcagtccattattttaaacaagtcattgaaggtgtagcatattgtcattcttttaacattgtgcatcgtgatttaaaaccagagaatcttttattagataaaaaacataagatcattaaaattgcagattttgggatggctgctttagaattgccaaataaactattggagacatcatgtggttccccacattatgcatctccagagataattatggggaagctttaccatgggggaccaagtgacgtttggtcttgtggtgtaattcttttcgccttattaactggtcatttgcccttcaacgatgataatattagaaaattgttgatgaaagtgcaatctggcaaatttcaaatgcctgacacattatcaaatgaagcaaaggatctgatatcgaagattctggtggttgatccaaggaaaagaatcaaaataacgcagatcttgaaacatccattgataacaaaatatgcacagtttgataggacgtattatggtgtctttaattctatatctaatttaaacggcttaaataacatgaatccatctattgttaatattgtatcaagacaagatattgatgagtctattttaagaagtctacaaatattatggcatgggacaccgagagacattataatagctaaacttttacaaacacctttatctgaagaaaaaattttttattcgttattatggcaatataaacaaagacatacagaaccaaaaaataattcaagtcaggatactacttctacgaatcaacaggcagcattgacaagtagaaaattacaagaattaacaaatgaaattgatatgacatcaaatgtaaaacccaccttggaaactaattccaaagacaaaattgaaaaagaagatgattttgggcacagttttggttatggaaattcatttgaacatatttcaaaagtagaacgtactactgccacagatgcaataaataataatagtaataataaactcgccacacctaaattagaacagaaatctcaattcagtatatcgaccttaatggaggactctactgatgataatgttatcaatattccaagattaccaccagcagttcctgcttttactgtatcatcttctaaggtattcaaaaagagtggttcgatgatgtcaatacattcgaaatggccactgaaaagtcctagccctaaaaaacccatacataaatcggaatcacgtaagtcattggttaaagcaaaaagaagaacattacacaattcggaatctaaaagatctctatactctttacaatcaatttcaaaacgttctttaaacttaaatgaatatttaattgatgaaaataaagattttgttcctacttcagatttatcaatattaccaaaagttgattctggcaatgagtttgccatcctttgtgaacaactgctatttggaaatggtcttgataggattcttgaagaagaagaaggagaaggagaaggagaagaaaaccgaatgccaaatgggaatgaaaaaaggaatgagaagattaatgatattacctttggtggagataaaaatactgatgagttagttagattaattgataattctagttttttggtaacctcatcgcctattaaaaaaagtaaccgagtagtaggagtttccagaaatacatcaatattggggaatcagtcattagaatctactgataatgctattgaatcttcttcaggaatctcagagttaccatcaaaaggtgtactatcatcatctacgtatcgaactaccagacctgatgaacgtaaagagtcgaaattaagaattacatccgctcctatggaccaaccaaatatctctttagatcctcgcagaaatgtttcacaaccggtaaaacatagtgtgtttgatactctgatgaaatcgcaaagaaggggtaataatagttttagtttgaaacaggataatcaaaaatggtctgattatacatctaaactaaataaggaaaggaagattattacgcataatcctttaccaagggataaatcaattgtaaatatgactttgaatgaggatttatccatggatgacaccagtgttttagcacaatctagtaccatacaacaaacacaaaaaccattactttcactaccatctactttattaagccaaactacaacttttaaggatttaactcaatttctgaaggacattgatgtaaatgatgaactaggcacaaaaccaaccccagtattagtaagaagatcttctcgtcgtttaaataagcctacacaacctgcacctattactcaacaatatatacagcatgataatgagacttttaatgaagatacagatttatcattagcactggatatacctactaccactatgacagcacagattattaaaatgaaacctactactcagatcatggatactagagtgactttagtcgcagaaaaaccatcaatacgtccttttacttcagatgatcatgaatcaattaacatatttgaggatgttagcacgacaagtaattcagatacaaatactttgaatgaggatactatgtcaagtgactcaacatcaatttcacgtgtccatcatcgcaagaaggtagcttctattgatactttaaacacatctaatatagtattgaccccacaaacaaatgttcgtgttagtctctatgcaggtaaaactttgttaccatcgaaggataatgctaacatcgaacgtgagactacagaagaaattatttctagatttcagttaagttataaggatataggtagcaagaaatataataatgagatttgggcatcctcgacaaaattagggtatttaaatagagagaataatgcaagcacagattatatgtttaaagatttagaagaagatctagaatggcaagatgaatcattagatgtcaataaatctgcagtaaaccacgtttctaaatctgatgaggcagctataaaaaaggatgatactaatgacttaggaaatgttaagaaaggtgataatcgtgttactatgttatttgatgaggaagaagaagaagaaaaggaagagactaagaaccatcatgaagaagattatgggaatgtggatattagcactaaaaataaaataggagatgcacatgaaaagataaatgccatgacacatacttttgtacaacattctggattatctaaaaacatttctgaggttgaggatagcattaacaaagataaacatagtggcaagtataatacaattcagcaaaagcaacagcaacatcaacaagttgatccaaggcgaatattaagaatgaaaacagcaaaaccagactcaatggagattggttccaaaagagtaaaacgtggttcgtctaattggtttaatcgtatgattaaaaatattaaatggagtaacaaaaattctaagagtaaaaaaaaaacgaagtctattggtagtaataataaagaaaataatatggttgatttaccacaataaaagtaaatcctgtttataagacattttcccttaaaaagggaagattttgtaaaaagatatatgtcattagatagaataaatttaataacattcctttcaaattggtaatatttactgagacatagaaggatatattgatattaattgggacatagtttaataaaaagaacctaatcaatcttgaaaacttcatggctgaatcaaaggtatgagatggtattgtatatcttccaaaagatactagaagagtatattcgaatatatttcctttttttttttgctttttttttagacgttttggttaataattatacatttgcgtttctaactaaataaaagaattttaatatatatatatatatatatccagatataattccatgtaatattagtgatgttaagtgaaatatcaattagaaaagaggtaattattaggatggtaatgctcatgatgatgttgttgttgttattattgaatgaattgtaaaaatcaacgcttacgttgttttttccatttgaaagttcttataccatccttaacaattttttttcttggaccgttctttaataattcattattataattcattttattttctaatgataaaagttcattagatctttcgatgtgtcttttgatattattagctaattttaaagattttctttgttttttctttaaatccaataaaggatctcgtattatttcttgtgaatctaatgaagataactgatcaagggacaatctattttcttttctatctaataaatcttttgttgtattaaaaaatttcaatggatcaaatgagtctaatttttccttagaatccacaaagactttatgattcccctttgattcgaatttcaattggtctttcaacttatttatctttgcaacttcatttaatcttaaagttctaatataattaacgtcttgcgtttttaataacttgacttgatcattggttaggctcgatgattgatcatttgaatgtctagacttaattaatagaccatcatttcccaaacgggctttaatcatggcatggtagtattcatcaggattacgttgttttgcctttgccttcaaatattttagagttgtttgttttttatgataatcctgacttctcttttgatagtccttatgtttttctaagagaccgagtctctttctctcatttagttgagatctttctcgatgctgttttttctgaatatcatgaactaatttagccattgttttttgttcttaatttattttattcagtgatgtttttatttttttttctaaccctgaatgtaattgtatgtttatgtgggtgttatttgaatatccatatgtaaccaatacagatgttgccttgataatacaagaatcagtcagcagaggagatgagatgagatgggaagagaagagttgagtttcttttaataaaatttaataattttcgttgtattttactcaaaagaaaaaaaaaattttttttcttttttcccttcttctttttttgtttttgaataaatccaaattctgtatggagagagagaaagagaagagagtgtagagaagaatactggggaatagtatagagaaacctgagtgtacatgcatttgcaatggacttgtgttgtgttagtatacaatagtttttatttgaagatcaaataaaaaaggggtagtgtgcatcatgaatagataagtagagggggaattagttaatagcagacaagaacatacaaatacgcatagatatacaattataaaagaaatatatatatatatatatataatggtgggacaacaatttataccttatagatatggagtgaagtgggcaatccaaatgagaagaaatgcaattattatatctccagataacaaatatgtggatttggggattgacggttctgctgtaatatataatatggctgatttaaatagtaataatagtaataatcataatatatatataatacctaatataattgaatgggataccacagaacagaaaatgttatgtcattatataaatgatcatatggtgggttcccctatctccagttcgtgtaataacatcaacggtgttaagaatgagagtagaaaggataacacaatgtttatttgtttaatacctagttttaagggacgtttcaagatgatagactggctattgcacaaattttggatatgctgtgaagaagagaaggattctaagaaagaaaaagaagaagcaacgcaacataacgataataatgacactaaaggtggcaagagcatgatgggaccattgcatgttagcccaagcctaattcaatacatcaaagatttgatgattcatctgagaatgcatagattgttggtacctggaaaaggtggtggtattcatactgggactttaaacgatatgattatgttgtgtgaactgattggttctgagatccatggcagggactacgttataccagaagacattaagcaggggttcaaatggtacataccatggcatatgatacctctgcaaccagatcaatggcagttagatacaagtttattgtatggcagtgatcctcgttatgtgaagcaatttcacgagattgtgtccagtgttcgaaccgagcctggcgcccttgagtatctcatagttgacgatattttgagaaatgtgataccggcgatttgaaatagaggaagaaataaaaaaaaaaatttttcttaagttgatatatctgaagaagtagaaagtgtgacaaatgtccaggagaaaagtctttgattgtcactctcgctatataagcatcgcttatcaattctatcacacatctaaatagtgtatatgttagaaggaactattattctactttttttttgttccattttctcttcctcttttttacgtctttatttatttagtcatttctaagcacatctctgttctttttacaagggaggagaaagaaggattattccaggttaattagcattcaatccaaaaaaaaaaaacgacggtactgtatctctttatacacacatacatacctacatttacatatatatacatatatatatatatatatatatatatcattgggtttaacaatgagcaatatcagatttatgaacccttgcaccattcagtgtgactcttgtggagaaatcattccgccccgtagaaagtttaatgggaataaacaattattgaaggaaaaatatcttgataaagtgaagatatataccctatcatttcattgtccacaatgtcataatttgctagttttacagacagatccacagagagccgactatatcacaaaatctggatgccataggttgtttcatgatagcagctcgacagaaggtgtcgataccactaagggagatgatgtcgataacgataagacaaaacaaattgaaagccggttgaaaaaattacaaaaacaacaatcgcagatggatgaactgagtaaaatccaagaattacagtcaaagatccatcagcaagaaatgttgactatgggttcaaccaaagtggaaaagtgtgatagtgaaggtgatgctgacgctaatgatgttgttcctggttttacaaccaagttttattcggaaaattcaatattcccgagacctgaaaaacaggtctcaaaacaattcgaagaagagtccactactattaacacttcagatttgattaaactaagaacaacacacattaataacaacaacaacagtaagaataataacaataagacactagataaaaagaattcatctttatcgttaggagttatcattaaaaacaaaaagaagaaaggtagaattgttaaaaaaaaataaagtttgacacaaactaataaacacacttcattttattattatcgttattattattttgtaataatgtctcctaaatacccatatccatataaattaaaaacctcagaacctcagttacaatatgaaaagtttaatggtgcaaattttggatacatgctttggaatgtaccagatggtgttgaaagacttggaagagtgttattggttcacggtttcggcgaatatacaaagattcaatatagattaatggacaacttggctcttcacggtttcgaatcatttatcttcgatcaacgtggtgccggtgtaaccacaattgatggtgttaaaaattcaaagggtgtaaccaatgaataccatacttttaatgatttaaaccattttattgaattaaacttgaagcagtgtaaagacttaaacatacctttgtttatgtggggtcattcaatgggtggtggaattattttaaattattcatgtcacggtaaatttaaatctgatatctcaggttatattgcatcagccccattaattatattgcatccacatacaagaccaaataagattacccttttactatcaccaatgttagcgaagtggttctcaaacactgtgatcgatacagggttggatttagatggtataacatcagacccagagtatagaaaatttttggctaatgacaagccgatgagtgtgccattatacggatcatttagacaaatttatgattttatgcaaagagggaaattcttatatcagaataaagataattatatacaaaaaaattgtcctaaggatgtcccagtggtaatttttcatgggaaagatgatattattaatgatccaaagggttcaaaacattttatagataattgcccggcagaagacaaactattgaaactttatccaaaaatgagacattcgatcttttcactggaaactgatgaaaattttgatgttgtttttactgatttattgcattggttaaaggaacatatttagtctacagttatagtatatattatatattaatattatattaaataggaaaaagaaaaagaaaaagaaaaagaataataatactatattaatattatattaatacaatattgtttgcttattcaaaaaaaaagtgggtggttgtaacattaaagtaaatttggcttttaaagcaaatctttttatgaaatgaactccaaaaaactttatgtattgtttggtacactgaaaaatagtttattttgatactaatttttaatagaacaatattaaaataacaaaaaaattaatagttaatattttacattgtttatttattgagatttagtgtttctatgtattgagtaaattagacacaatctcaatattattctataattactgtatagttattaatataggaaaactaagcagatttttttgtcctttttctttttacatataatagaaataataacatgcaaaaaatataaataaaataaaaaattagtacgaagggatatctggttttatatatttaaatattgagttgttaagttattctcttttttagatagaaaaaattgatcatcttagtttttttagtactatctaaaaaataaatattcagttttttattaattggtttttgtttaaacttccttagtttatttatgttattctaaaataccttattccagcaatatttatctatttaaataacggtttatacattgtcgtctatttaagtaatatacttttcacatcttgggattaaatttttacatttagcttgagaaaatttcaatttcaaaccatgctatctagaccaaaacaggttaaaattgtactcaaacgaaaggctattaatattttcaataaacaattattttgatgaatgaacctaagaaatagttttagaacatcactttatgtgctattatatagtccaatataataattttgttctttatagtaaaatatgacaaaatttaaaccaaatagcatctctttctttttccaaaaaaaatattaatcaatacacacacaagagtaactttggaaaaataaagtctttacaagttaagatcaaaaactttaacatatattgaacatattttgtttgcattttatatcctattctcaatataaagaaaataatagaatgtgatcgaattaaaaaatccataaaaaagagcataaatatttttttagaaattataagactgcaatatagttcatttaaaatctatccaaataaaacgcgtcaaagactgaatagtttttttctttctcatgaaattagaatactacagattattataaagataaaaagtttaaaaaaatgtcatatttgaaaaaccatgattgcaaggatattcttatacttcagctattaagggatcataattctattctattattcttagattaatctacgaagaaccatatttttatacaaagtctagatactttagaaaagtccatcaaaaaattaactagtaataactctttgaatatccgtaattccataaaatataatagttaaatgaccactatattattcaaccttctttaacctacccaataaataaaaaaaaatttaacctttatggtttgaacattgcataaaataataaaaataaatggtaatattcttgccagttgtcatagattattacacaaaaatcatcaactatacatggaaaaaattaaaaaaaaaaagatagaaaatggaggatgactcaaattatattaactttgtgaataatataattcaaaatagtattgctcaattaaataagatttaaccatattcttgaacaagaaatgtaagatatcttaacgaaatctatatcagatcagatatacaaattaaaaaaactccatggaacaattcataacaactttatttggtggcttttttatttttttcgaaaactcatatcaacccattattatatatattccatgattggaagggaacaaatataggtatatttaaaatacgaaaaagatctaatataatattaaatttcatgacttaagtttaccgttttttctctttcatctttttgatctatcatagttcactttcttaattatagatatataataacttgtatagtatataaaacaaggaaatatgctatttaattccatatttatcataacaattgttctatatttacaagtactaaaatgcaaaatatcaaaccactacaacttattaattcttgaaaatagaaaactatttctgtttaagtttaaatatcttatttttttgtgtggaaccaccgactaataccgttgccactattatcgttattaccaactatgctatttcttatagtccttttattgctaggctctttacccacaataagagatgtaatgcgtgaaaatcttttctttgaattattcctagttaacgtagtatctttattacttttgttattaacaaacaatttatcttttagcaaattattatctaaaccagtttgttctgtgttaaattttggacactcattgtcattatctgcagaaaaatctaagacgcaatatttttcataattgaatatattgtctttaccaaagaatgactgcttatatttatttataccttgcatgtcaatgactatctctatagtatcatcattttttcttgtgccatttttatttgactgtttaaggtacattgaatgacacaatctttcaatatattctcgattattactaatattatgaccagggtactcatttttctcaaaaatagttatcaagttattcaatctgtggttcaataacagatattcttgttttatttcctcagtattacttatcaaaatattattactatcattattatcttttatattatcatgtatctgtaattgtgatttaaattcatctccaaaaatctctgtattatccttagtaatgtcttcaaactctaaagtaccaatagtcagatgatttgcattatcaatttcctcttttctattaatactgtaagaaccattgttattattgtttaatatcttaatcaattctgtttcgttacaatgaatatcaataaaaaaccgactatcaaaactattactattatcaatataattatcttttttattattaattacttttggataattaaatttaaatttttttggagtaaaatctaacttcttttcactaactctttctatgtaatcaattaattcattcttatgcttattaataaatttgtcattcattggtgttaaccacttttctttcactccaaaaaatgttagactggagaaattcaataatattttgctcaatatagttaagttacgcctcattaattctgagcagttaccatgaatcaatttgaaaagttgtggatttaatattattggacaaaagaatcttaaaaataatacactagacacacaatacaaagtaacttcttgtaatttattcttgtctaaacataacatttctaactgctgtcgaatcaattttataatatattttatttctgtaggaagatcattactagtagtgtgtattatatcccaaagcttatctaaccagtacaaaagattttcttcgttggttttaatctgttcatcaatttccttttttgtatttagcaaaattctttgaggatcagtctcaaaagatatcttatcattgtttttgataaggtctttaatagtttcacctactgatttaaataaatattcttcaccaactctattaaaatacttttcgactgaaatagtgaacagagaattaccacgaaatatagagttgtaagtttgttcggtagatcttaatattagtgaagaagacgagcttgtgagatagttgtttctattcatttcgtagctaataatattatgaaaccattcaagttctttcttgtagtattgaaatatattcaacattactcttgatagaggcttcatcaaagagatattctctttcaacttatcaattacaagcttcaatatttgatccattggacaccttaacaataaggatttaaattttgaaaaattgctatctgctaatacaatttgtaaattagtatcaatcttcagacatatactacctatttgaaagtgtgtattttttaggtcatatataggaacccaaacttctgtattgaatttctcggattcaagtatggtttgattcatatttatttcacttattacttgagtttttatattactcgtcgaattgtatatattgtgcactatcctaaattttaattcatatattggaatgatttcttgaattgtaaattcttctctccaaaagggcaaatttgtgctatgaacaacagctgttttagcaataagttttccgtttgccaatatttccacatgtaaaccataatcacccaaagcatcaagatgaataatttccagatttgcctcaagtatacatattcttaatgtatttgaaagcctcaattgattagagttattcatataacttaaagataatctttcatttatagcaaaagataacattgacatgtaccattgtgtcatatcaaattttgatggaaaagaaagtaagatttctttgcacgatggataaggcctattattagattcgtatattctgaaatgagtattcatcttaaatctcttcctaatgtgactattttcacttagaaagatacaaaaattgtctggtgttaatgatgaatccacacaaataatttctgaccgtaataaagttgttaaatcaattgagtaaattagactaccatcaatctgtgataataattttatccttccatggccatcaatcactcctatagctggaaaccattcataagtcctttcattatgattttcaaaaaatggcagtgatttcagagctatattgttgttattattatccgtcatactcatattattattatttttgttattattattaatatcattatttacaaatatgtgtctatttgaagaaattggtccaaaaatatttaattggcaaatattattggtcgaatcttttcctgtcgttgggaatatgctatcagtattatcatgtttaaataagcataatttattatataggccagctggtttcattgaactccaccaagtaagaactatcaataattctttgaactttgatgttgaaaacactttaaaatagtaatcttttgattctgatgaaaatatttctatgtggatgattggtacaggatcttgagattttactagtctgacaactgacccttgaagactcttaataattgcgtgattaggtgtctgctggaaagattctagtgcaatgtccatttcatgtattgataagttagttgtagatgatgttgcattgatctgtaccatttcttttttaccaacagaatgaattaatgaacctcgatcggtaatttctaaaaaatgtgttttccattctcctgaaaacaatttactgcaccatttcacctgaccaaggaatattcctttattttttattatacaattgacataatcatccactgagaattgctgttgcagtttatttattttttcagaaaccgactcaatcatcagtgaaaactatattcctttgatctaaatagttttctaattgaaatatgtaatgtctttaataagctaaaattacaatgtcaatgttgaattagcgttacagaggtagttaacttagatacaaagggtttagttgatgcactgctctagtagctttacttctaatcatcatgaaaagttgttgtttagcaggctcttttaccataaaaaaatgaatgagctagaaaaaaaaataaaataaagaatatttccgcggactcttctaattttttcgaaaatactttaaaatttatggagtctgtgtatttttttaagagaaaaaaaaagaaataaaatctaaggtattaaaaagaatcgcgaaataaaataacattcaattgaaataactaacctgtattgtattttctagcccttaacatatatataaattcgttttttgataatagagatcagcattgaaatattatccagaataaacaatgttgaaatagaatgttctatgataaaatagatagaacaataagattttagcagacactaaacgataaattgttgagtaataattattgagaggtcaccaaaagttgttgagtttatttattaaatatcttactgttcgtagaggaaaatggctgaatgttaacatatataaagccaaggatttcatcatacattatttttatcttatttacaatctttctatattattatttctatgttgtatatagagaaagaaagtgaagaactttattataattttgtatactaaatctgtttaatataatattgagaatgtttactatatatccaatgaataaaggcgctcattcccaacaaacaaagtttctgtaattatagtttcatataaaatttttatattgtttaacatacgttattgactactcataaaatatctgatttatgcatttccattaaaacaaataagttattatcctataccttttaacttgtaacaacagttatgttagaaatatgtatatcttatgattttcctttatttatattatttactacacaaaatatattcattatattaaataatatattcaaactaaagggttaacttctatgttatattcagacactatttttcttgaaaaatacgtttttattatactgaataggaggaaatgaaccactttccttgttataccttacctaaaagacaatttttgtgtatttaatattcataaatctatccttagtaaagtataggaattagtgtctttttctacaatatatttttgatcaggagtaatattgggaacagtcgataattgagattgtacatttttgttaacttgcatattattatgtaagggttatctcaagtgatatactaaaatatggatattaattatatatataaacatttacaaattatataattggttgattctaactattaaatagattagtcttggatattcgttttgttcgttaatctcttaaatagattatgaatattaatgctgataattacctctgacactatctttgaataatcaagggtctcttaagtaagctttttaataatttgccactaatgtccatccgacgatcatatgttagtttgcatacactcacaaccttgggcccagagtttcggttggtccaagtccttcactccgacattaggcgttacgtgcagactgcgtatttcagcatttccagttagggctccttacatattatttatcattataaaataacttatttgtatgtgtaagtaatatcaaacatcttattttcttatgtgacataatacataacataaaatatgaaaatacatataatctgcaaaaaacaatgaaagaattattttttcttttgtcaacaaaacaagtttttaacactatttttgaatttgaatagctttcaacacaaggagataaaataagtatgactataagtcattaaactatttctaaaataatattatgcaataccttataatggaaacaaatatagttaaaaaaatcttacataaaataattatcacattaaacaataacaaatttatatacttttttacggaatatttatatttatttaacacatgatctttaaataataaaatattttttattttttgaaataaaaataatatttattttaaatttccgatttttttaaaaattaattttattcgtttataatgatactatttaatattggtaaaaaataatactagacgaaatattgttgtaacgctaatagggtttataagttgtgatttttgaaatgccaactatctattagagataaaaaaaaaaaaaaagaattttttatttttctaaaattctagaaatggtaaaatgctaaaggaaaaaatatatctaggtataattttttatgtacttaaatagtcgtttatattatgttaaataataaaataaggcatactgattctaaattagaaatttaacaaattttgaccataaaatcacggaaagtaaatagtatataaacaaagtaataataactttattatgccataatacattccagatttcctatttcccttaaaaaaataaaagtataaaataaagcataaacaaataagtataaaaattttttcatcaaataaaagtttattaccttagctttacacaaaaatattatattttatgcttgttttatatggtaggtaatgaaaatagttaaaaatctataagctgtatatattattaacatatatgttgttcaatactatagaatatatcattaaattcaaaaaaaaagaagaaaagaaaagaaaagaaaaaactagattactgcagacatcatttaaattatgagctttctttcaaatttaactaacctattacttgatattccctggtatttgactttgtcaaaatcttaaaaaacttgttccatttatatgtttttacagctctggtataaattatattatggtagcctaatagcaaaattcatttattcccattgtcagtcttcacagttagtcattggtatacatctattttactctgtattaatttatctctgttttgaacaatattattcatactatagcgatttttataaaaacagagatgtttctacaatgatctctagactagagttgatgtactttttggttggtcttaaatattattttcatcctctttattacatccacatcattaaatcacctcccaaataataccatcaagattacatgtatggaaatactgctaatatttataaagacataatagtactagctagtgcaacaaatcatatacttttttttgttggaaacatgcctataccaatatatggtgttgatgatgttatagtaccatactgagatactacataccattattatttttttattaaagtattattactaattcaattgaactcggcactgactttattgatgtcataaatagtatctaaaacattcacaagagtattcagtaagtccacagaaactctcagaaaaaaaattgacggaagtatgtaagagagaatacactgttttaattatgttaaacactcttagagagataaaatctccatcaggtagaaaaactaattcttaaagttgggtattcatgataaaatacaataacttttatgaaacaaaaattatggatcaagaattctataaaaaaggtacatcaatcacaaagctgtattttcaccgccaattggatataaatttgttagattttttttattagttttttctataaaatagaatatggtaatttttaagttgattagtatttatattgtaaaccactcccaggtatgaataacctactgggaaagtatgaaaattaaaaagtggtccttacggattagaataattatccctaacatgggattatcacatcaagaaaactctggaggaaatagaattccaacagtattttgcttaatttggtattaatagaaagagagaaaataggaatatgttttgcattatctggtaggtagatggcttatttggctcaagtatttctatccaggtacaaaaaaaagataagaaagattgtattaaaaatttgtttaaagatttatagatgacaccccactcgatataaactcttttctgttcaggtatggattattggaatgaattctcagcttgagtacttttatattgtttcataacctaatagatacactagtatttttttacaaatactcaaagactagatatcggaaagtttttatatctgctaccaaaaaaattaaagaatatgaaagaaatttatatgaaaattactaaaacagtcttggtttatccttgcaccatcaagatcagagttttaacatataaaagttatattaataattaccttaacatatacacagatgtattataagcaggctatcataggtttaattaatttatgggtatatcgataaatatgttcctgctttaagatcatgagatgtcaagaagattccttgcttataatattatctacagaaacaaagtaggtggcagctggtgaaaaactaaagaaatctacctagctagatgaaatattgaatgtgttacaaattaatcccactaaacatcaatttttcattgataataagatagtaattgaactaacagatcattgaattgtttaatcaaagacgaaatccaatggagtaaggtactattctttcagagaactaatagaattagaattaattgaagtttaacacattggcactaaaaaccgaattgtaaacacttgtaaaagcttttaccaagagggctgtttaaatatttatttgaactaatttttagtaacaattattttgataatcataaaacatctgttaaggggaccttttgagggttacttaaatccaataatcatcttaaagaaaaaatctagttttctttagaaaactttgtgtacaaataaaagattgaataaagtttctttgtcattctttgtatatgttgccataaaattaactttattattttgcatattgtctaacttaataggacaagctgttcaacatcatttattcatgccaataagttattttacagtgatagctaataatatttatgttaatgagtattaataacttcaattgttagctgctaccaaggttgaccttattcaatttgttatgccagattcctattgttattattatttcataaaataatatatacaaccttcttcgaaagatgtagattaaatgttaagatacatcccatcttagttgatataagcttactcaaaccatacattaagtgctttgtgtcttaccactttaaccttttaataggaatatagtaatatatgatatttgtgtgagtatccctaatgagggtttgggatttaaaaatcttacagaaaaattgtttatttttattttattttactttttccccatttgaaagagaagagatattttagtatgaaagtaagcaaagtaggtaaggttgagttatttatacaccagtgcacaattgtgatttagtatggaacatatatgtaaatagtgaggtttagatgaagagagatatataatagaaacgatattttattagcaaattggcaattggggatttggagggcaacatttcccccctccccctttcaccggatcattcagctactaggcagttaggaagcagtgataactaagataccacagtcctatgacttttgtccatcctagcaacagacatgttgttcctttagataatatacacataaactatatagaaggatagctataaagaatattacagcacccagaaagaaaaaacctggatatcgggtactaaaggtacagatgataattgcaattaatcatgatgaaatcaagatgcacgcccggagttgagtgagtcgaatagtacccgcaacaagcaatcaaaaaataaatatgaccaacgtttatagaacgcaaagatggaacaaactaaataaaagaaagtacaaaaaacataaaacattacagggaagtcacaggaataggatatcgagaacgtcgtaacccagtagaatttgttgataatttacacaattttgatgacaatgcataaaagaagagcagagttgtgtgaaaacagccccaatacgaaaaaagatttacgttcctacgactgtttgcctaagatgatcattaccctcaccaccattggtagaatcaggagccttgaacagagccctgtagagaacaagtccacttcccagaagtatcgagtccttaaacagttgagatggatcaacatgagatactcgggccagccatcaaaacactacatctatttacaaaaaaaataagttagaaaagaacggtattaagatagagcattcctttgatttaggagctcttgtatatacaatgggtatcacacaaagtaaaaagatcatgaggcgaggaggaaacatacattaggtaaacgaactggacaaaagttggagggtaggaaaaaaaaagagcgctctttattttttttttctttgtatgtttcttagttaagatgagaaaaagacactaaagcaatcacacgatagcgaattaaggttctaggttaatatacaatggacaatggacaacacattagaaaatggatgtattgttagtgggattaggaaagaggaataagagacataaaaaagtagcgaaaagaaaattgctagatgataataatacagaaaaagtgaggttaataatgagattgaaaaagtaaaatagcgttaataatgtggagtagccataatggatggaagtagaaaatttggattgaattactgaggtgtgagagatacttttttttagcgggctatattttttttcttttttttattttcatttttgttataactgttttttattataacatttttttttttattttattttagcagtgcactatttagataaactgggactagagaattaataatatgagagatatagaagaaaaaaatagagatgaaaaaaaatcaaaataaaaagtagagatggaggaggggatggtaaatgaaaagagagagaattggaaacgatttaggatgttgttcattgactaaccaaccaatcattcagatatacattatagcataagtatgcctcttagatcatgaagcataaaaaaaaaatactacgagatataattgacttttgttatgccacccagaggaacagaaccaccagttccattaagatgtgcaaattataagccctaggagtatcttcaacttgttcaatattttattacgaataataaaataaattttgatcaggtaggaatagaaccaccagttccatctgacaaagagagccgcgagtcaaacaagaatccaatattcctatgtcaattattatctctgaaaaattgtccattaaaaatctcaaacaccattttcctatttcttggcttgtaaattcaactacaactgtaaaatctgaaatcatgtaaaaaaaaagcgcctctgtaaaactatcaccttatgagtaatagtggaatcaagaactaaattcaactaataaaaaatatcttcctcaaatcctaaatttgggttaacaatagtcttgaacttgcataatggcaatccacagatcctattgtattcactctcttggaatagtaatggaattgaataaaattaaacaataaaagggtaaaaaaatctccgaaaattctctagtaataaaatatataaaaagtctgcacttgctagtatcattctcacttgttggttgcatatatgtcacagcatatatatatatatatatgacctatattgtcagtattcattatatcaggataataagggcttgtatccacccatctacaaaacatttttgccatgactgctattgagtattagtattaatattattatcgtatgtctgttagtattgtaaagtaatgtgtcctaatcccttgggagatattcactcatcttaacggatctttttaccacatgtggtaacaccactggatatacaagaactactatgccattagaatacgctatcctaacacagtccctccaacttagtttttctgtaaatagacgggtccctttggttgaattcctagcactcacatgaaccacccactctcgttgattctttcatgtaagaaatggaatcctctataaggtcactgtcaaagtttctaattctcctagactggatttttgggtatgtctcttagctacaggtcgtagcccaccactttttttagtataaaggagaacaattgttcttttaacatttccactatcagcttcacagatcaagctatgtattattatctccattatttcattattttagaatcaaactgagaaattcttttttttcaatctttttctttgtgatcattctgacatgttatatattttcaaaattaatttactttttcccttccacttttgttttctaatagatgttggacatgttcacttattggttgggtgtgacaggagctattggactggtttctttgtaccttttggaagaaaatgtgtatagagtaaacacctattcctttaaatattattttgtgtctctttcttttttttaaaaataaaaaaaattaatgtcagtgttttcccgtaatattgaagaagtgacacaaaatggagtgctcaacgacaaaataatgatttttgcttttattgcattttaaaaagaaaagacacagaatcagggagggtaaaaaagaagaatgggaaatgtggtttgtaaccgtattacttttaaaaaacacatattgttttttattatgccagagaaaacagtaatgatagcagcaattttgcgacaaagataagagaaatttgggattgaagagtttgtttttgtctacagctataagagtttacaccattaagaaaagcttgctataaagttactttattcttctttttttttttcttttttcttttaagaatcttaacaagctattttggatagaacaaaagttattacgtttgttattccatcctgtatgattagttgacttttaaatgtttaattagttatatgtagagtctactgtaattgtacccttgagttgttatgtagttctcagtaatttgaacaaatgatttttttaaggcttctagccagtatttttagatttgtttttgaatgttgattttgaatagggcaaaattttgtgtctaaaattagaaaacagacattgcactttaagctattaatcaaataaaacacatgaatgaaccccttccattttgggaattatgtaaacaaagggaacaaaataaaaagtggttacaataaaggaaaagttactatttctgttcatttttgttcactttaaaaagatattactcggcggctaattttactagttacaagatgcaagataaatctgcttccagttttgataatccctaaatcatattattgtttgtgtttagttttagtcttacttatacctatatatatttatatatatataggtatataacctatcctgtacttttgttttgttgaagaaaacaatcaatactaatatattgtttcaatcccccctcaaggactttcttatcttgactaattagtagatttattctattaaaataatttaatataatgtatcattcagcttttctaaaatatttttctatatttaaaagtttttttaatcataaaccattacagttccatgttcctatactctataaaatttttacaaacaagttgattttactatcaaatatgagtctctctgtgtatattatggatgtcatttaatttaccatttgttagcccttaaaacatgttttaaattacaaaaatattctagtaattagatcaggtgaaataattattcctgtattttttgttactaaaaaaagagagaaacaattaatactaaaaaaggcagtatatttttgtcctttatctttcttcatatcattgcatacaaacatcaaaagataaaataacaaaaacagcaataatatctatacataaccctaatttttaacctggatgtctcctcaaaacattttcaaaaaaaaaaaggagataaaaacaggaattttctaaatccgaaaagttcttagaaatggttttcttttatgataaatttgcgatataaaaaatgttttatattttcaattgaaaaaagatttagtaacaaaaaaaagagggagacggaactaatagaaaaaaaaagagggagacggaactaatagaaaaaaaaagaagaagagaacaaaaaacgataagaacgattaacatactaattatttcgcgattttttggacttacactaacctatggtaacgttattctatgtgttctaacatcataaaattaatttgctgttagcttcgaaaccgtacaccttattatttcacctcgtttgtttttttaatcaattacatttgtaaaatttggaaattgatatagcactgcatacatacatgccaatatagacataaaatgttatatgaattaatgggtattgttcgtgttacaaatacattacaaggacctgtagaagctaaggaattattaacttctattggtaaaactattctttctaacagaggtttaatcagatcaattattcctattggtatagagcaattttcttctgtcttaaagaaaaaccaaactaaatactatcgtggttacagattcgttatgttatttgattcatctgttggtgtacaatctgaaataaatagaatacttaaaaaggatccacgtctaattcgttcatctatagtgaaaattaatacaaagagaaaccttgatatagcttcctcattagatagaatccaaagttataattccatattacaaaaagttggttctaataatatataagtaataaaaggattgtcttctctttatattcattttaataaattttcctcactctaaggttttgcttatatatttcttcttctcccctttctccctcaaaacaaagttaataagggagttaaaaaatgtaaccaacgaatatcgatatttgtctacttcgactacatatttccaaactagatctttaaatatctgtttttcaatccagaaatgaatcatacaaaggacaaataacacaaaaacaacagcaacaacaacaaagggagaagtactccttttacatataatgtatatgtatgtaatatcgtgtaaatatttaaagtataaatacaaatatatatatatatatatatatatatctatattaatttaatctattctcttattgctattaactcttggtggcaaaataatttcgtctagggaaatatttgatgtagcagatgatcgtgaagtatatgaatttctatcaaaaatgtttgttggtgccacactatcttgatcatccaaatcaaactctaaaacactgttatcatttaaatcgaggactcgcgaattatccaatgatgctaatggaatattttcgatatcatcattatcaaaaaaacttaacggatcctcccttaccatatcatacttttctatagttgaataggaccatctacaaagtagacttgtgtcgactaaaggcaattgagtatatttagtatattggaaaatcacataagataaaacggaacctgccatcaaatcaacaaaataatggtgagtcaaatacattgttgaccaccacaaccaacaaacatagccaataaataatggtcttaagaaggggaagcaataggagaaaaacagtgcttccatagtggcacaaccagaatgtaaagatggaaaagcaccaaagatgactgaagaattttcaaacccattagtataaagattaatatgtaacaattgatcgattcttgccaatccacctggtgaaccatgcataccataatgtgcagactgtaaaccataaaggatcttataccatggtggtgcagcaggaaaaaaattctgaataatgacaccaaaaaggttcatataaccgaatgcaaaggcgtaaccttgtaagatagttggtggaccaaagatgaatagaattgcagcaactacaaatggagcaccaaaatgaaagagaccatatgggatccatgctaatatatctaaaaatgaatttgttgatgtggctaaaatatctgacaaattatcaccatataatatggtttcaattgcaggtaagactttaacagtaatgggtggtcttttatctggtgagaaataagaagatgtaaaataaagtgataaccaagtgaagataggtaaagcgttgaaaaaaaactgacttgtcaaaggaattagaaataaaagtattaaaaatgaatatattgagcatttaataatccagggcaaagggtttgtgataaaagtaaaaagtaaaattgatgccataaaaccatagtgacatatacttttccatgtccaacgataatttttgatagattgaatggattttttaatgttcaaacttgtttctaattcagacacatctgaattcaaaggtttttgtgaaagaaaccatctataaattaaggatgacattgtctatgaaatgactaagtaaatcaattaaagaaaagctaaagaaaattcaggctaattaataagtaacaatcaaagataataaaaaatgacaaaaggccaaagaagaaaaaaaaaacagaaaaaaagaagaacaaagtgaaaggctagaatattaaatgaattatggaggaaattagaaattaaaaattaaaaatcaaataagtaaattgataaaaaagatcaactcctataacaaatgatgtgaggaaaacaaaaaaaaaacaactgaattaaataaagtggtattaaaaaaattcttgtttattacagagtatatccaatgagtatatgtatgaaataacaggggaataagtacagaataactaaaaaaaataaaagcaacaaaaagaatggacaatttaattacaacaagaaataacttgtattaaaaaataaccaaaaaattgagggtatcgataaaatagattatatattttttaaaatgcctgatgtattcttaaataataacgtttcctcctcactatgctgtgatgtattttaaacaccaataagttgaaatggacagatgtagccaacagtagttgtgaaaaaagatagtaagcaaaacgtgtatatattcgaagttagataaatattactaaggatattaagcctcgatagaaaagaaaaaaaacagaggtaaaagaaggaagaaacggttggtatctctgtcttaacagtcaaaataaaaacaaaactataaaggtatatataaataaataaatgaatgaacattgaaaaaaaaaagaaaagaatgagaataaaaaaatgtttcaaaggaaaaagaaaaaaaaaacaaaaaagaaacaaactaaaataaatccgcgtaaacagcccaaagaggaaacaggacaaaagaaaaagaaaaaaaggaaacaatagactccccaaagtgtctcatctaaaaaatgcgctgtcaacaaagaatattttgttttcttttgttttcttttgttttcttttgttttcttttctttttcttctcttctccccctcctcccaaaaaccaaaaaaaggaaacaaataaaaagaaaaaaagttaaaccctactttaataaaaaattgtgaaaaaatatacattaaaaaaatctactcaaacctaacaacaggagtgacagaggtgagaagatttaaaaaaaagagtgaactgcccttcgaatttaaaagtatttttttacttttgtgaaagaaaaatatagaaaatttataaatgaataaaagaatggataaatagatagaaaagaagaacctttaatataacaatcatatgagctatgatattaaacctacatggtacaagagaaaaagaatctgttgtttaaaaacatgcataaatattaaatagtaaaagactattacatattaccactagtctattcaaaaaatatattttattgaagtacacttaatcaattaactaaacgaaaaacaacaaaacaaaaacaaaaacaaaatcaaatattcgtgaatcatactttattaaaaatataatcataatgtctttgcctttaagagtatcaaaaagaaagaataaagggaaaaataaatatatagaagctttattaaaggaagaaaatgaactattgactgtatcaaataaaaataaccagaagtttaaaatagatagaggttatattgtgtattgtaatgtttgtaatactactgatgataactacgatgaattgactgatccatttggtgatatgattcaatgtgatagatgtgacacttggcaacatattaattgtattttaaaaaatcaaagtcaaccaatagagaagtttttcttagatgataaccaatatatttgtaatcaatgtgatccaacacgatacccacatcttctatctcttaaagttaatcatactaataacaataatgaaaacaatacaataaccacttctgctgctgctactactattactgctactactacaactactaacactaccagtactaacaatacactaattacatcttacaatgatcttaaagatacaaatcaaaatgttcaaagtaatacagctatacaagaagatgagaatgaaaataatcttgatattttggatgaaatttatgaaaatgattttgatactgaagaagaagaagaagaagaaaaaaaacagaaacaaaaacaaatgcaagggaaagaagagacgagaaaacacagaaacaaaaggacagcaggtacaaagaaagattctatttcctttaccagtaataagaaacaatcaaatataaagaatacaaaaacagcatcatctattgataactcaacaccagtaaagaacgtttttagtagaataagagaaaatgcttctaaaatgtttattaacctatttaaagattatataataccggagacaattcaaaataatgaatataacttaccagaaaatatcactgtcgaacaaaaggcacaggaaatgggaaaatcattagaaaagttcctttttgattttgtcaatgaaggaaaaccaattatgattaataaaaagttgtattctgaaaaagttagaataatctattcaaatgccaaagacattaaaaatttgaaattgaaatgcaagatcatgaacgatgaattatccttagaagatttagttaaattagattcctcacaactgattaacccagatttacaatcttttaaaaagaaaattgattcaaaagtcatggatcaagtcgttttcgaagttctctcagataaaccgatttatataaagacacatagaggtgaagaattgatggaaaggtacagttccgattcaagtgctaagaacgttagttatgatacaaatgataacttagaaagtgattttataataaagaatcgtactattaaagtgcataatgatgacaatgatgattctcataacagtaccgcttctcatgaagaaaataaaactgaagaagcagattcaattcaaaaaaacatattttgtcaaaaagtaaatattaaaataccagaaatcttatcttcaccatcactaatgaacaatgctatatacttatcttgtagcaatccaaatttgcgtcatccatacaaggaatgtctcttgaatggaaacctaacggtggaaggtagattaacgacatctaaagcatatacatatttaaatgaggttaaaacctctcgaaatattcttgcgtattatttgaaagactattcagtccacaattatgctgaacttgttgactggatgctactaaacgataaagttttaggtataaaatgtcctaaaatttatgttaaaaatatatatcttattgcaagtaatagcggtgagtatcctccaatcattaatgaattgtttcctgaacaaaacttttcaagcatgataaaatattctgaactaaaattatttgtattagtagttataaaacctgaattgatcccctaaatacataaattcatatccttcgggttgtttatctccttcacgttcattattattattattattattttttgttttaactttattttatatgtaaagagaattatcacagcgtattgtttcatttatattatcacatgaaaccttcaactgattctccaatccgaaatcatatcgaatataccacaattgaaaggacacgtcagttgaatcagcgagaaacatgtaatttatcagtatataaccacatatatatacacatgtgtccatatataacctgtctacataatcaacgtacacaaacatcccctatgaacgtttcataaagacgataacgtgaataatgaattgattataattttatacatatattttaaaaaattttatatatagaatataccgtttcaactaatttaagccttagctaaagccttcttgacagcgtatctcttttgctttcttaagaccatgacttggaatctttcgaaatcagttaaagcagctcttctttcacgttgagcaatcttcttagcccaagaagattggttccacttttcaacaataccggctgcagcgaacttcctagcaacagtggcagttctagcacctcttggtaaagcgaaggttaatggagttaagacaacttgacctaagtggatggattgtctttggacaccagtttctggaccatcgattaagacctgttataaaataaaataaaataaataagaacaaaaaaagtaaaacagagttattttctctctccctttctttttttttttcaaatatgatattacattgttagtaaaaaagaacaagaacaattctaaactaataaactaacactagtgaggattaaagttttcttttttggcaaattgaaagtactggtgctgtcatattcaagatcctataaattgcactaacaaataaatctcagagtatctcctggaacacacaaacaaatacgatcaaaaaattaatattatatctacatgtttctcaaaaagtctgaaacatctttcagttatattttctaatattgacattaatattattatctttatctttactgtcattatccttttctttatgtataaacattatatcaaatataagttcaatctttagtttatcccgcacctcttttatcccaaccttagttaatttaacattaaagatagggttcttccatcttgtaacataccttcttttgatcaatgatttcaacaatggtagctaatttaccagtgttcttgacaagaacaacacgaccaacttcgactaatctccagttagaggtcttaacaatagaatcagtggacatttttggattgcttatcttattggaaggggtttcggtatatagagagtaagcactacatcctgaaatacctatgcaaaaatagtatataacaatcaagatattgagaacaatatccaaatgtatcaatagttcaccaatagtgaccctagatagtacaatgaataagttaataggtgattgtagaggggtcaaagccaaactctctgccgtcccttccatggaagaacaagtctgagtctaatggtcccatcgtaccaagtttgttaggattacacactaagaagcctgaccatagggaacaacgttgggagttgtgcgaagtgttagaatcaagcgactctggcaaagtgatgctgccgtgtcaaagaattcaacttgaaacatttgttggataaacaaggtaagaatacactgaatgtgtaatggtgggaagtgaagtggggagaatggggagagggagaatgagacatacagagaaagacatatacagggaaacagagagacagagcatatgagtttgttgtgtacggcctttgggaatgaaaggagtctaccccagtcttgttaagaaattgctctaatcacccaggcgacttccttcttgccaaaatagagtgactctattacatgatccaattgtgtttatgccagggaattaattagagtttgctttactgaacaaggaagaaaatcgtcagaatattccaattttagcaaatgctagttttccgatgcatgctttttttcttgtaaatttccctaaaaaagcatttactgtcaaaaaataagaaaatgtctggatgttttaaaacagtcacaagctcttattttttcatataacttatattccacgtatatttatatatacatatatatatttttttccatttcccatttttgtattttttttttgaactagaaaaaaactatattgcgaaaaccgcagttgtataaatagttgctgttttacagtactgtcttctcctcttttagcctgtcactgcggaagcattagttttcattcccagtataagcaaaccctgaagaatgatgtttgttttagttgcttatctggccttactaatgcccttttccttcacgaaggaaggaattgccacgataattttaactggatagagataggcccttgtattatgctgtgctacgtcaaatcaatggatgattaaaacatcgtacaactgcatatttgagtgattataaagatttataaccactgtataataacataacttgtttatctagttatattattgtaatgtgttttattatgttttctttttcctgggtgaatgatgatataatttgcgattgagtattaggacctggtaacacgcctagttaccgttaagggatcttaatgaaatgcgaacaactttttacgactgactaacccaaattgcttataaatatctacacacacacaaacctatatgcatatatatgtatatattcggtatcttattacatgctttctataatacaacattagcaggtcttaaaaaatgatagtaagtaatggattaaaggactgttttacaattatgtgttttagtaaactagaccagcttgtaatatagtactctattcgacttcttaattcttgttaccgtttgtactccactgtcttgtcatattctgttcatactcagtctttaagggtataaaggttacaaaatgcacaagataacatataacttcgcttcttcaaactaaactacacttatgtttctcaagaaaaaaaatcaaagagcacagatgaggaagaatataataaaacatacacatatagtaaggaacaaaaagtattgtacagtaatgcaacacatatacatatataaatattgactagataaagcgtataaatacatatttagggaaaactatcttaatatacatttttaaacgcattgatacgcaaagattagaggtgtttttttgtatttgttattatacacacacacatatatatatatacagatatctattatcccacgtccaaaaacacaatatacactttaaactatagcaacaatgtcaaacagtagatatttccaaatggaatcaaatgtatgtttatttagagttttgaaagaagatacatcatctctcttttaatatcatttaaagctttattactaactatttttgaagggtcgatcgcttttatttacttattttactctattctattatattttattttattcaacaattaaattagaatgatgaaagattaaataatctggcaaataaactggcaactttcagaggtattaatgaagacataaatcaacaggcaattaatgatgattcacttttgaatcagttaaatgattcctttacaataatggcaagtaatatcaaggactctgcatcaaggctagcaaggaccatgaatatggggaacagtgtttggaaaatggtagggttagcattactaatttttttcataatatataccttatttaaattattttaattgtactatttgataatttgcatctaaatgatataaatatggctgttttaattaattgtagtcaaagtaaataaatcacaacaaaagtaacaatgaatcatcaattaaaaaaagataaaggcggcagatataaaacttagatattccactcatatagtacgtgtttttttgtaaaaataatataaaataaaaagtacaaatcagctaagagataaaataatgttatatttttatctagaagctgcatcctttcctagtctataattgccaatggctttcccccaattaactttagatctagtcacaggtaattttcttcttaaacctttgaattgtttttgattcaagttttcaaactgtttatataattcattagtaaaatctgtctcccatttttcaataagatcaacgatagactgatcactatctaaatcatttgtatattttttatttgattggaatctgacattaccatcttcataataatgaacatcaacattaatttccccttcttccacagtattcttatccatatctactatatagtgtgatctccattgaccattccaaaaatttgattcattatatttatcactaataatataaataatgtatttaccctcattattatatggatacatggcaatagaatatgttcctgggaaattcttttcaacatattgtttcaaagcagtgtcaattggaatagatttcgtttctgcagaactatctaatattgtaccttttaaagttattgggtctattttaacaatctgcccattattattataatcaataaatatatccttagtatcttcttcttcttcattttgaaattgattataattagatatgatgagttttccattgtcattcaaatgaacaatagtcccacgttctttgttgtattcacggatggtattaagaatggtatcctttccattaacccctgaaatggtcaataaatcattgaaaatgggttctaattcacctggggaggcatcattaataatattttggatgaccgttttgaattcagacatatttgtaattataagcaattaaacaaaaaataataacgaaaagaaggatctaggaattaacaatatatttattatttgaaagtaaatatatttatatttgtgtttataattagtaagtttggaaaaatttttgtcaattctcagcagacttttgaatataaatattgcttcttaatagaccacaattggcttgtaactttctttttggcccttctcttatactgtaaattgactacgcgtttttctactctcttactttcttttctacttatttatcttatgtatatatgtaacttttaacgttatacaaaataaatcattatgcgatcttttttttttttttttttcgaatagggaataattcctttattatataacttttgcatatatgtaaaaaaaaaccttaataaaagatatttaaagtatcccatatgtcatttaatatatctatcaatatatctatctatctatctatctatctatctatctatctatatatcagtatgcatatctatatcattgataagatggaggtagatgttgtggagggaaattaggatattgttgtggaggaatattagtattagtgaattgttgttgctgagttataggattgtactgtaattgtgattgtgatagtactggtggttgattatacataggatttacatatgcagatgttgttctcttcatgatatcattatatgtggcctctgcattagctaaaagttgatataaagacgctaatttatctctttcatccgcatatttcccaatcaattttgttatctctggtctcattggtgttacttccccatataatgaatttacagaatcatcacttagtatagagacatcgccatttgaattttgtaatttaagatttaattgatcaatcttatctttagaattgagtattttggtctccatttctttattatgtatagtgttttcaacaatatcattttgttctaaaggcgttacataattaattgggaaaataccaatcttgccatgtaaactaccacgccaccaatcacgataaacttgttctaatacaacaattatatcacctttgcgaaaagataattcatcaggttcttttgaattcaaatcatacatggctttcactcttcttaattgtgactttttatttatcgattcttgccttatttgagcatttatattgttcatgttattatcgatggcaatagtactgttgtctttatcgatatttttagatatagattcatttttctttttggctagttcatattcttgtaaggatagtcttatggcctctgctaactccttatcttcctcttttaattcgttttctactctatttgtttgctttttctcaaaagtataggaagcagaattattttcattagatttgcctaacaattcactatgatgctttaaaagctttctataaatatcgttcattgattttaaagacggatcatttttaaaacttcctgccaattgttcaacacacttggccaaagcttttttcaaagtgatatgcacctgttgattctctattaaactgtataagatgtttgtaaaatgtttagaactaatttcttgctgcaacctagacccacaattctctgcaagggcaattgtcaaggaaatagttcttaagatgacatttgcgtctttttgttcaaatcgtttctctaaacattggatcacgattttgctattatcttcagggtccatcctcactatatcacatacattcatgattctttgccaattgtctgcagttaatgtagcatcagttgcttttagcacagcctgatttaattttattttttgcgacatgtctggataatgattagttttgtagaaattaggtggcaactcagttaatcgttagtttactttatttatcttaaaacaaatatatatatatatgtatttattatatacatgaataatttataacgataaatttacttgaatgtgtatctattcgatagtatatatataataatataatattaaaccaacatttaccttaatagaaaattacattctctatccttctctttccttctgttctccctacatttgatttctttgatttgtttctttttttttagattgaccccattttttatcatacaagaatcaagatgtctgggtgttagaaagactggtttctgataatttgctatgtgcacgcaaaatttgatatttttacaatgcatgtatatataataacatggatgatatattatatattatatatatgtagaaagagagagaaagagtttaccagacaaaaatattgggtaagtgtcgaaactttgttctctaacttctctctctattcttttctgagtatgagatggggtgtacatttgcccacttacattctgtattctacatgttgttgttgttgttacaacgatttaaaagaaggaatattggctgctcaactgataagaaacaactatgtttctcaaacatagttgtatttgcctgtttacacaactaaacacactactgctttcttcgtatatatcaaaatgaaacgagccagctttacatggaaaaaaaagaaaagaaaaaaaagaaaacaccacgaaacagaaaaatcaaaataaaataaaataaaacaaaaacagattaaacgatgctattgtctaggaataaattacattgttgcagaacaatatacaacaacaaagaaatggaatataagccttgactgaatgtatgacgtaatgttataaagtacccagatttctgctttgattcttgtttcttgtttcttgtctctttttctgtttctttctttctttcttttttttcatatattattgtgtcgtttgcaaaagaacttcacttttttttttttttcttttttatctttcacatgagtataccccacatccataatatcttattaggctttactcatttcagaatttcagaatggctcgaggaaagaatgttgcataatcatcagtagtttgctattgtcacgggctatattgtatattatacatatttatctctctgtatgtgtgtgtgtgtgcatgtaacaaagttttgttcacccattactagagacttgaatgcttttatcattaactaatggtaagcctacgtgatgaataaataaataaaaagaaataataaaaaaaagacacgaaaaaagaaacaagagatgttatattatgactctattcaatttataaaaagagaataaatgctgttttctttcttcttttttaaaaccatgcctctgtttatttatcgtatacttcagttatcttgatttctttgtcttttcttttatcttttcctctttctttctttatcagatgttacatctaagttgcttgtgattttatgtgaagttatatatataattgtttaaacaattttcatatctttgacatttcaaacttcgaattaataatttcatatatacatattattatcataattaatatcagtagaaataaacaagcacaaacataccaatctctaacaacaataacgcatatgccaaaaataaatccttttaaaacaaggacaacaaccggtgggttattggtacgacaaggttctgctcgctcaaggcgaactagttcagttggaaacattaatatgggtgacacaataccaggtttggttaccatgaataccacaagagcagctaaaacagaatcacgtaaacgtttgcataaattatctgattcaaatactaatgtatcgcaaaaattttggctttccttccttgaaatgaattatagacatgcatggattttacctttaatcatattaataattgtatattctgcatatatgacatcgggaaatttgactgaaactaatcccctacatatgtttgttgcaatctcctatcgtgttccaggtacaacagacgtgtatggcaaaggtatcaaagacctttgttttgtgttctattatatgatatttttcacatttttcagagaatttctattagatatcgttattagaccgttacccaatatggctaggtgcaacaaataaaagcaaaagaataatggaacagactttctatataatatattattctctgtcaagccccttcggtctttatatcatgtatcattcagatctctggttcttcaaaacaaaaccaatgtatgaaacatatccagacttaaataatccatactggttcaaaatattttatcttggtcaagcagcattctgggctcaacaagcatgtgtccttgcgctacaattggaaaaaccaagaaaggatcacaaagaaatgatctaccatcatattgtgacacttttgttagtatggtcgtcatatgtcttccatttcacaaagatgggactacccatttatattaccatggatgtgtcagatttattgtttgccttatcaaaagatcttaattatatagattctccattgacaccatatgcattcacaatatttgtttgctcctgggtttatcttcgtcactatgttaacataaagattctttggtctgttctcactgaattcagaatcgtgggtgattacaccttaaattttgctacacaacagtacaaatgctggatatcgctacctattgttttcaccttgattggtgcattacagttggtacaattgtattggtttttcttaattttgaaagtactttacagaatactcacaatgaataactatgttgacattagaagtgatgtagaaaaggattcaaatagtgattcagaatccagctccgaaatcagttttgaagacaatgaaatgaatgacgagaaaaaatgaagataaaaaacaaaaaaaaaacatggaagtctctattgtaattcttaatctatttcgtattgtagcaattgactactgtcgtttcccatcttttataatattcatgtatttttgggtgtattaagatcaatataatattaacaacaccatatgttgtttttataagtatagcactgatttttctggacatgtgtcaattatcttcgataaacctattaattttcaaagacaagtaaataaagatttacggccattaatattatcaaccttatcttttttttttttttgacactttgtgtaaaacttatgacatgcattaaaataaagcagaaaagaaaataaaaaaaaaaaaaaagaaaacggagcagaacggaacaggcaccaattttttgttctgtcaaaaaaaaacaaacaaaggtataacaatttaaagatgaaattttttgtaaggagaaagcaaatgaaacttttcctctaacaactatatttcctggtcccatcgcctaatgatctctttcttgtttatgtaatcgttattatctttatacacaagaaatcaaaaaacaaaataaaatagaatagaatagaaagcatatatctaagtgtgtaatcggttagtataaaaacacgtttatctgccattttctatatatcagtaagtatacacacaaagaaaaaggaaaacacatatatactactgtatatcttcataacttttgcacctgtttcccatcaaatgtcaaacataaatttactgcaaagaccaagaactagacccagaagggcatcttccgtcgggaggatcgacctgggtgacacagtttcaagattacccagcacaagacaatcaagatatgcatctcagagaagaatggagacattatctcagatcactaaaaatgatagagaattacttcaaaaattctggctctcctttcgtgaaatgaactatagacatccatggattgcaccactaattgttttagtaattgtatattctgcatatctgacatcgggaaatttgactgaaactaatcccctacatatgtttgttgcaatctcctatcgtgttccaggtacaacagacgtgtatggcaaaggtatcaaagacctttgttttgtgttctattatatgatatttttcacatttttcagagaatttatactagatattgttattaaaccattacctgatatattaggtgccacatataaaagaaaaagaattaaagaacaatcattttacgtcatatactatgctttatccagtcccttcggtctttatatcatgtatcattcagatctctggttcttcaaaacaaaaccaatgtatgaaacatatccagacttaaataatccatactggttcaaaatattttatcttggtcaagcagcattctgggctcaacaagcatgtgtccttgcgctacaattggaaaaaccaagaaaggatcacaaagaaatgatctaccatcatattgtgacacttttgttagtatggtcgtcatatgtcttccatttcacaaagatgggactacccatttatattaccatggacatatcagatttattgttagctttatgtaaaattttcaattatttgaattattggtttaccccaatatttttctttatatttatcgcggtttggatctatacacgccactatataaatataaagattctttggtctgtccttactgaattcaaaactgttggtgattatagattaaattttgctacacaacagtataaatgctggatttctcaacctatcgtcttcacattaattggcgcattacaattagttcaattgtattggctgtttttaatctttagaattgtttatagaatggccacacaaagtgtttatgaagatgttagaagtgatgcagagtctagtggagacgaagatgatgaagaacacgaaaatggtacagaaaagaaagaagagaaatatacaagtatcgccaaaacttttaaaaaacaggaatgaatgattttttcgatatggtacatgaaatgcctatatatatatacatatatgttatgtattaggtgagtagattattcaataacagtaagaaaacaaagacaaacgtttaaaaaaaaggattacaaaccaattttcaacactttaacaaaagtaaagcacttccattaatgaggcaggatatatatgtgcttgaacaccaatttattttttctttttttttttttttgtaataatataatattgcattcattgtactagaataaaatattatagaaaaatagatatatatcagtaaaatatattcaaacctccataaccgtgatctattattcgggttatattatcactgataatattatgtatctatatatctaataaaaaacaaggaccgattaaaacatttacatatataaactatggatacctaataaaggatagactgattagagtaacaatggaattaataaaaaatgtatagcgttgatcctttatttcctttttaacataacattatatcaaccactccctaaatgtaaatgggccaggtagaaagattgactaaaaatacaatattaaatagaataattgtttgacaatactgaattagttatggatactctattttaatatgccattttattattcttttaatatttattttcttacatttaaataacgtagaaacctttttaaatttagaaaatttatgaaaatagttttcatatatctaataagattgaattagtaatatttattattaatagcactggaaataatcattcttattgatttttacaccattcaagaagtcagaaaaaataaaacaactttatatattatctgttagtattttaattctacataatagccaccaaaatcttgttttttttttaattcattaaacaatatcaatccccaaccttttattatatatttcttttattgatctatcttctctctattttatgacacactctctataaaatttgctctttgtcatgcttttcccttttcattttctggtctatttttatcatgagacaaaaaaattacgcaagaaagagcggtgaagaaaagaacaaaataatacatagtaatatattatattaaatttataagtcaaagcacacctacacaaaattattaagaagcaaatatattccgaattaagaaattatatcagcataaatagacaactaattcatatatctttacttaaatactagccgtcaaaaatgaatcacgaagagtgtgaatcatggactagtagtcatggtaatcaagataattttgagacccatgacagtggcgataatgatttcccacaccatgagtcagaggttgaatggaatatttctcacgatgatagtcaggacagcaattctggaaatgagtttctttacgaggatcattatggtagtgatgaagatcaggattccgaacatgaaagggatattaatgaaataatcgatagagatgagactgacgaagaagaacatgaattttttgggcccggaatgtcttctcgtgattttatgaacactttaagacaacatatgagaaataatgaacatcgttcgggtactcatgaagtccatgatgaaaatgggagaatgaacttatctgaagtcctacctgaattattatcgatgatggggtcagcgggtgatgcaggtctaaggaatcgtagtgatgcaaacagtagaagtgctagaatggcaaaattagtagataatgtggaaaatgcagaaagtgatccttattttgccatggaaagcattattgaattatcagagaatttattaatggtcaatcaaattattattgaaaggattttccccataaagagactcttacatgctttagttaatattttaggatcatttaaattaagagatgagttagaattacagttacaatgttgtagatgtttgtacaacatttttgaagttcatcctgagagcatgtctgttgctgtagataaggatatcattcaattcttacaaagcaaattaactgagattagttacattgatttagcggaacaagtcttggaaactttggaattgttgtcaagactatgtggaagagatattttacataatggacaattatcttcctacatccaatattttgatttttttactattcatgctcaaagaaaatctgtagcaattatagccaatgcatgtgccattgtcaaaaactcagatttcgagacaattgaggatttatttttgactctaaaaccaatttttgttaattgcactgaccaaaccattgtctcaaggttacttgatactctatatggtatatgtggtggaataaaggatgtagatatgctggaatcattatttactacagaaatcacccaacacctaattgaattgatttccaatagtgacactgcattagacgggaaactgaaatgtttagatattctagcactaattgtcagtcactgccccaagattgctcatacaatattgaaatcccctaatttatccataacgttggaaaagtgtttatatcagtatggaaaaaattcaaatgctagtttacatgaaactatcatgttcgttcctaagaatttattgaattcgatctcaagatttcttgtcttactatttcctcctgaagtagaacaacttttgactgtcaaaaataccaatttccgtgataacgatacagatttcttcagtaattttaaagaggttaaagaaattagtcatttacttgaaaaattgattccaatgctgtgtgaaatttatattaacacaatcaattttagtacccgtcgtaatgttttaattggtttaaccagaattgccacatatatgaatactgacgtagcaaaatattcggtagattattttattaagttgttgggcgcctctttggcacaatctaaaaatttcctagaaaatgggacatctaatccttatgaagttggagtattaattattggattactatctatagttaaagtattagaaagaaactttttatgtattttcacaattcccttcaagaaagagggtatttatgacactataaagagtatcaatcaagatgttttaaaatttcaagagaagaatgaggtctcttcaaatcaagagcctgaattttcagatagagaataccgtgagtattctgatgaattggatcaaaatacagaacatgaagaagaagaagaagaggaagataatatttatttagatgacagagatattccaaaagaagttcttcccaggaagttgaaatttaaattcttaaataaactaactagtggagaaatgttagatattgtagttgaatctgcagaattaattttgtcaatggtagactcatcaggggaaattacatatgaggaagatgaaatgacaaaaaatatggttaagactctagaagaaatgcatgttgatccaggctcctatgatgacgtatatcgattcttgcttgctgtgaatgattgtatttttcaaaggcatacagtattatctggatttgagttagtatccaatcaattacctaccattatagcaaataaattatctgaattaaatcttaattggactaccaacttacagagtgctgtaaagactgcatttggcgataatttggtagaactcattaaaatattccaatctgcgttaactcgagttgaatctttttccattattgactcaggccttcaaggtgaagaaagaggaatggaatctcttggcaaacaaatcaaaatccatttacactatgacggtgacagtaaaacatttacaccattatcaacaattgtggtatcagtacattgtattgcctcgtttaaagttttagaaacattcattaaagatagagctgtcagagcaaaaatatttagtttaataatacctacatcaagtgatgagggatcaggagaaaataatggcgaatcattctctaatgctaaatcaattaaagaatctgtcttaaaattctactataatgatgaggaaattgatagtaaggataccatttttggtgctctatttaaaattttatacaaaaaagaggataagaacgtaagagacttatggaacgatattcagaatattcatttcaaaatatatgaaaaagataatactaaaatagtcgacttaggagcaaaaagcaaccctgaagacgaagattatgatatggaaaatgaagaaggagatgaagaaaaggaagatcctttgtgtaatatatatgataatattgaatcatttggttctgaaacaaatcaagctacagaagatattatgaaagttttgagagtgttaagagtttgtttccaaaatgatgattattttgttaattctaaattaagcgcaaaattagcaagacagctggatgaaccattagtcattgtgggcggtgttttaccagaatggacattacgcttaactaaggaatattcattcttattcccatttgaaagtagaatgtttttcttacaatgtacatcctttggatatggtagattaatacagttgtggaaagataaactaactgctgaaaagcagttgagtagcgatgatccattattacaattgggacgtctttcaagaagtaaaattctgatttcgagagagaatatgttattagcagcactaagaataatggatgattatagtaacagtgccgctgttctagaatttcaatatacagatgaagaaggttcagggttaggacctactttagaattttattctacaatttccaaggactttgcccaaaaaaagctaaatttgtggagaacttctaattttgatgaaggaaatgattatgtaacaggacttttatacccaaaaccagtagctgagacagattctcaaaaacaaaaaattgttgaattattcgattacctggggacttttattgcaagatctcttcttgataacaggattgtggatttccgatttaatagtgttttctttcgattagctaaccagattgcggcaggaaaatcatatgtggaatataataatatagaagatggattttccatcttaaaattagtggataagtcattgacccaatcattaaggtatatttataatcataaagacaataaacaagtcattgaagaaatgtgtttaacttttgtcttaccaggttcagacattgagttaattaaaaatggttcaaaattaaatgtacatgttggaaatgttactcaatatatcagatctattatctcttatattattgatataggtgttaaagatcaaatcaaatcttttatctcaggattctcaaaggtttttccttactcaaatttaattattttgacacctgaagagttagtagaattatttggtagagtcgaggaagattggtcgactgaaaccttgtacacctgcattacagccaatcatggttacaccatggattctgcaactattcataatttaatatccattatgtcgagtttcaatctccaagaaagacgtgcattcctacaatttattactggttcacccaagttacctcttggaggatttaaagcacttaaaccaaaattgacagttgttttgaaacatgcggaatctggtcttaccccagatgaatatttaccaagtgttatgacatgtgctaattatttgaaattacctaaatattcttctaaagaaataatgcagcagagaattacacaagctatacatgaaggtgctggtgcattcttgttatcataaaaagaatgaaggtatgtagtttttaaaaaataaaatgttaagaaaaggtcagaacataacaatatgagttaagtagaacaaattgtttgtactgacattgttaattggtttttttgtttttcttacatctttaaaatagtataataaagacaaacagtatattcagatacatatgcttagtttaatggaatataatttttaatactaatattataataatacttggctgttaatgattacattaatgctatgccattttttgatttgaatcaacaggaaattggatttgatcgtagagatggagttttatgattttttcatttaaaattattcaaaattgaaaaatactctagggcagaatagtagttttttttacttttgctaggtttgaagtgcatataacatagggtttattttttctttttgttctcattttttctcattttttcttttttattttgcatcgaatctaatttgttttaaaacagtcggaatctcaccatttttttatattgaactattcataaatacttaacaagtatagatacaacgtggagtgttgtaacagagggaaaccccacgagcttatcattatttatactttctataaattactacatatctttttgaacaagtggacaaagtttttttctcttcctagagactgttttccagagaagaaaaaaattattcaataacataatataggaaaaaattgttgaaaaaaagtgtcgaatcatgaacacagagaacaatttgaattatcaaaatagttggatagaacaagcccgtataaatcatttaaatgaaatagaaactgataggtttatggttgaagtaccagagaaaacaccaatatatacaactatcaagcattcatattcctccaaatcattacaaaattccccaaaatataatgatctgaatcaggtttcacttgatgatccagtccatttcacaagaatttcttcctcttcattattgagtgatttttcatcatctgagagtgctgcagatagtataaaagatagcgatcataagagtgatgaaagtagaagcatcagcaatggtagtggtctccaagcaccattcagattcaattctatttttacgcagtcctctgtagctgcaagagatactgaaatatttgatcatgcaaccatatctgaggataatacaaactcaacaatacggatgtccagatcagagcaaggaaatgtcacaactacaacaatcacacctgatacaagcagcagcttatttgtttctactgaaacaccaaataagggacaattttttaataaaaatattaatgtaggaagtactgatacttcatatttatataaaccatcaattaatggcatcagaaccattcctaaaacagcaatagaaacatcacctgtactcacacatgccaatgcatttcccaagacatatacccccaatgtaacaagtaaagcagcacttaccaaccgtatcacgcctcaaaaaacatatgagatgtctactccatctagaaaaaaccatagcagaaaaaaatctactaatatagtaaaggatgtgttttctagctttatacaaggtatacgaaaaagcccagaaacactatcattaagaaaaagtctcgatatttctagtccctataacatgaaacatatccatcatgttgggtttgatcatactactggtgaatatacaggattgcctgcagagtggcagcaactattaacttcaaatggtattaccgtaaaagaacaggaaagagatatgagtacgttggttgatattgtcaagttctaccaagatgtaacaaaacaaaatggagatgataaagtaattgagatgttccagccttataatatggatatattgagcattgaagagtcttcgagtttaaaagaaagtaatcattctttaaaagtgaacttagcacgtactcatagaaaagctcctggtattccaactatgaataagaatgaaaacataacaacgggagttgagcatgagatatctggaactgaatctattttactacctgaccttcctccaactgatatggaaatgcctttagagactcagacaaaaatgaacataaacaaacctaaccaagaaacacaacaagaaataaatgttcctaagtcccaacaatcatttaatgataaaagtaataagccacagtcagttctgttaagattacccactcagtctgatattgaaaaaaagaccaaatttttaaataagttatcatccatatgtaacaagaatgatccaaggaaatactatgtgaatttatcaaaaattggtcaaggtgcttctggtggtgtttatatcgcccatccaataaataccaaccattgtgttgctattaaagaaatgaatttagaaaagcaacctaagaaagagctaattatcaatgaaatcttgacaatgaaagagtatagacacaaaaatattgtaaattttgttgatacttatattgtagataagaatttgtggattattatggagtatatggaaggaggttcattgacagatataattcaatattgtattctatcagaaggtcaaatgggcgctgtctgcagggaaacattaaaaggtttacaattcctgcattcacaaggtgttttacatagagatattaaatctgacaatattttattgtcaatggatggtgatataaaactaacagattttggattttgcgcccaaattaacgatattcatatgaagagaacaacaatggtaggcactccctattggatggccccagaaattgtttctagaaaagagtatggaccaaaggtcgacatatggtcattaggtattatgataatagaaatgatagaaggtgaacctccatatttgaatgaaacacccttaagggcattatatttgattgctacaaatggaactccaaaattaaaagagccagaaaagttaagtgatattttttataaatttttaagccgttgtttggttgtagagacgcaatacagagcatcagctaaagatttgttgaatgatgacttcattattaaaattgctgatgataaacgctctttatcgtctttggttaaattggctcatagttataaaatgaaggaaaatgctagcaattaaaaataaaaattgttaagcataataatactcctaaaggatgaagtatattatatatgtatatataatatgaaaatttcttatgcataaatttataaaagtaatgataattttatattcatatgtgcaaattaaaaatcacgagaaactttttttttattttgtatgctaaagaaaaaaataaaaaaactaataaagaaataagaattgtcccaagctgtaaaggatggaaaagatgattttttaaaaagatcttatggctcgacagatgaactaatagatagggatgatgattgtctaattgatctggtggaagaactactgttatattttaagtttttattttgaggaagttgatcaaaattttccgaaactattacttgaacaaaaaacatttggacttcattaccacctttgttattgaaagaatacttattaaaagctgggatttggaaagtacaacctgatgttacaatgaatctctgcttgtttaaggtgacttctaagatacctctaatcatataaaaagtaataaaggcattttgagaacttgtcatatttcttttaccattgattggaatctttaacattccactggcaaaaagatccttatgtttatcgaaagtgactgctaatgaatatttttctgtgtcattttgtttaactttttccatttgatatattccaggtccataagcgacagtttcgttagtagtattattcaattgcttggaagtaaaaatgtttgcgttcaattcgccatctcttaaccatgacccatttctagtatctttaaccatgccacgacgtaatttcatattttttttctcttgaatactgtccttttgacatgtcaggggttgtattttcatcaagttcaaactcagtagtatcatcaagataattagtttcattggtattactatcatgtggtgaatttattgggcgattattatcatcgtaagttatgattttaacaatatctaaagaaggattatcattttttcttttataaacaattttttcattcctccaataatctaaagttgggattttgattctattcgattttcttaaagtagtagtatttgaagactcctggtcaatattggtttcatggaaattatttgttcctgttggtgaagatggtatataggttgcatcaatgtcaacatcaaaagtattattatattctaactctgtctgtacattattgttattttgatcctcgtcgtcagatgatatatttgattcagaggaagaaatctcgctttctagaatagcatcatttgaagtggctaatgatgtattatccaatgttaattcatcgttatttgtaagatccggaagagaaacagatgcatcttccttcttttcttttcgttcctctgtcctatcatcatttatttctatgtatggatttgaattataatctaaccaagaaatattattctttttattattattttgaacgtgtcgccttgtctgattcaattgttgttgtgttgatacatctactgtatcgtaattatcaggaatatcttgtggtgaaatcaaaggggtattcggaaaatcattataactctttataggattatcattggtgatattgatagtagtgatactgggagttatatcgaggttgtatgttgttttataattggataatctgaaactcgaatcatctttaaaatcatttaacttttgtttcttcctagcatttaaatacagatgatttctattggttaatctatccttttgttcctcttgaatggattgtagaatactagtattaaaaagagtgtttgttctatttattggtgttctatttattgaaggtgacataatatgtggtgatgatagataagcaaatttatttttatgtttaccattgctactgttattattagatctagtagtagacaatcgcctataatttctagctgagggagacaaaatagatgatcttttccctgttgatgatggagtagacttagcatatacactgtctttaaagaagtcgtccatattttccatgtcaaattcatctttgtcgatatcatccttaacagagattccagtcttacgggacttaatcccaagattcatgtaatccatcttagtctatattattacctatttgtctgtctgtatgatagaggagtaatctttcttaactgtatttaattttctttttttttgtcgtttttatctagatacttgacagtgatttggaacataaaactgctaactatccatatcccataaactctcttatttgaagctactcgcctacttatgtgttattactttgttgtatgcttctatttgtatttctttctttcttttgctttagaggaaacaaaaaaaaaaaatagaaaatgaaaaataaaaaataaaaaacaaacacgaaaaacaaacaaacaaatatcatggtaatagtaccgttgcattatactatattggaatattcttttaacgatatctgagcatttggtatgttggtactgactaatgaagaccaaagcaaaaaacgaaaaagaaattgtatgggtgatgattccaaacttcaaggtgatttggtgtcttctttttcttactttttttcgtttttattttttagtatatacatattatttctttatgtattccttcttttgcttaccatagacttcaaaatatgctggtttttcattgaaaaggtatccattcaattgtaagtatcgtttgacttgaaatctaacaggactttttcctccgatagaatgaataccgcgtcctgttaccaagatcaatggttcaagacaagttaccctttgctgtttcatattgtaattatttagttctctcaatttcaattcttcatcccaccacttgttcatcacgttgtttaatacaattattgcatctcgtggcgtaaaaccatggaagtccagtttatatgtgtcaaatacgttgtcaatttttggatccttataagtcgattttatttcaatggaattgcaaatgctactattactcttagtagaagtagtactcctctttgatttgtttgatgttaaattccatgctgtctcattaatgtacttgttgaaagttaatgcgatcccatttggataatctaagatatattgtaatatcttatgacaatactgaatatttgtttttaattcattggattggaagtattcaaataattttaaaataaattggggattgataccatcgcaatgtttatcttgtttaattaaagaaagatattcttcgtatgatatgtataaattttcattttgattctcatcttcgtcttcattcttgctacttttcttattattattactattgctgttgagaatgcttttattttcattttcatttttatttttatttacatttatatttctattgtgtgcaaaccctgtattattttgtactctactaaatctcttgccccttgaagtcactatggagatagaagatgtgggtgaaggtaattgagatgcgtggatttcttttagtataatcggtatcagagtctttattacactaaattggttttcatgatataattgtattaataaagatcggtcgtttttccaatttaataaaccagccaatatgtcaatatcattataagtgttttgccattgatttttattcttcttcctttgtttgaaagtgtgttgactatctaacaatacaggaataacagggttctctgttgttgtttcattgtttatatattccaaatttagaagatgagtaattacatttgaaatttttccattttcatcctggaatacagattcaataatttttgggtctagtttgggaaacattgatttcagttcttcaaattgatgagacagtgcaagagtttgttctttgtccatatcaaatgtatcatcgtcgttattatcatcatcattatcgttatcattatgacctaagttgccaggatcgctgagaatcatagatacacataaatctagatcatttgccgcactattcaaatattgttccaattcgtgattttttatatccgggaacaattcttttaatatatccattgttgtcaatggctagtcaacaattgtgaacaaaaaaaaaagaatgaaaaaaaaaataaaagataaaagataaaagaagggaagaaacgaattgcttggtatctatttgtacacgattaaataatgaaccatatctatcgtttaaatagtattgattatcgatagaatatattgtgaagggggagggataaagtaagaaatctttttttaatccttcttcttcatttaatatgcagtagaatttattttttttttgatttttattttttatttcatttccctcgagcattaaaagggaaaaaacgaaaagaacaataataagaataaaaacaaaggaaaaaacaaaaacaattcttgatttctcatcttctatggtgatgtttaatcacttggtcaattaagcttttcttatatgctggtccatgaccatggcactcttcatgaccacgcaatgaggccataataagatcaatatccatttcattctcttcccaatcgccatcatcaccactagtggaagtggttactgtattattataagcaccattattgctattactactactactattattattattttctgccagtgagcttttcttgtgtaaatccagcaaatatttccatgtagctggaatagttaatagtatattaccatccttgtcattatattgtaaattagaaacttgatcatgattatttgtatgtttagaatcgttatctattaaagcgttataaaactcacctatagtaggaaacaccacatcatatttgggtggtgaggtcgagtttgagtcgttggacggtgatagtgacggtgactttcgatggacgttattcagacgacggtatacgttatttattaaaatgttttcgttcttcagtttattgacctcttcgtgtaactgtgattggatcatttcagactcattcagtttccgttccaattccatcatcttagcttctttccttaatctgaatgctttctgagccttcctgttctgtatttttttttttgactctttggatcgttccgaaagatcagtggccccagttgcaggatctttatcccaagtcatcagactttgaatatatctatcaacttctaggtttctcattacacatacatatacgtatatatatacaaaccaataaacaaataaacaaatagtttctctttatggatataccttgcctttgctatcgattagaaagagacgggggggaaggggataatataaacatgcatatacacacacatgcatacatacatacatataggtgtatatacaggtatgtgtatatgtaatctctgcaaaggaaagccagtcttgtatgatcaacaaacgctgtctcaaaaacaaaagagccttggcagaattgcaattcctctgcttttggggatgtctgggtctctagctcttgtctttttatttctttcattcctttattcgttttattgtgcagctggattgggttgattagttttgttggttgaggagcttttagagagtcgagtgtgtttgcagcaatggtttatgtttatcagatttattcaatcctccaccagacaaggtaagatagagctgtcagtgtgtcggtgtgcatatattagggtaggaggtacgttgacacagcaaggtattatttactaagaataaacgattcttaatattgttagtagtgggaacagaagtaacaggagtacaacgatgtttcaatggttctttggtaaacagttgaccccacaggaaaggttaagaaagaacctcaggtccttacaacgtacacaacgggaactagatagagaaatactcaaattacaacaacaggtgaaagttttgcaaaccaacactaaacggtccatacagaataatcaaatgaatgcggctaggattcaggctaaggacttggttcggtcaaataactatataacacggtttcagaacgtgaagttgcaactacaggctatcgaacttcggatacagactatcaaaagtaacgattctatgatcaagtctatggttgatgcctcgagggtcttaaatcagatgaatcaaggtgttaacttgcctaatttgaataggatcataatggattttgaaagacagaacgatataatggaccaaaaacaagagattattgatgaaacgatggatgacatgaattatgtaggtgaagatgatactgatttgttggagaatgaggatcaacaagcaaatgaaattattgaaaagatcatggacgaaatcggtgtcgatatttctgcaaagatgaataaatccatggttccgaataatgatataataaatcaaaacgatgaagcacagttaaagaatgatattagcattgcaacgaagaataagtataccatgtcatcacagcaaggggaaactctgatgtcaactggagaaatggataatgaagatgaattgttacaacaaagattaaattctttaaaaaaataaaatgatatatgtatacatatatatatacgtgtatgtatatgcttgataatatttatttttactctctcattcttttccttttttttttcttcatattaatttctcattgatcaaatattgatgaatgatctctgcacattcttccacagatttcaaatcagttcttagatgcaattctggcgataagggtggctcatatggtgcagatatgccagtgaaatcctttataattccttctcttgccttcttataaagaccctttggatctctttgttcagcaacttctaatggcacatcaacgaagacttcgatgaaccgtaacccagattccttgtgtaactcacgtgccctatctctgtccgctctatatggcgatataaaacttgttaaacagatagtacaagaatctgcaaacaacttagacacttcactgatccgtctaatgttttcgttacgatcttcttcagagaaacctaagtctttatttaagccgaatctaatgttatcaccgtctaatctatacgatgccagccccctttgtaataataattgctctaaggcacatgcaattgtagacttaccacttgctgacagacctgtcaaccagattgtacaaccgtgctgttttctcaatgctttgcgttcatcatatgatagatttggatgccaagtgatattagtggccattgtcttgtgttgttatgccggtcagtgtttctttcttctattattgtttttggtgctaaaatgcaaatgtcttatgggcttgtgtggtttatcttctacttagagaagtttcaaatagaaaaaaaaaataagtagtttaaaagtatagataactagtttatgtattctccacttatagaatggtaacatttagttttatatatctatgtttccaatatacacatattaatacacatacatttatagaaagtatatatcaataaatgaaaaacacacatttcattaccactacaagtactagtattaccactactggttctattattcttattattcatatgtggttatagaaagaatgggcaaaggtcgatagttgaacaataaaataaaagttataactatagttaatactcagcacttcaacttttttttaaagaacagtatattgtgtaggatacattattcaataacacacaaaaagggaggaaggcaagggtttttgcctttctatcttcttctgcttctcttaattgtgtgtgtgtgactacacgtatatatgtatgtgtgtcacatttcctctatctcgactcccgatctctatggcttcttatttttgttttttttttccttcctctcattcatttaattgccaccacagtttttttttttaacttttttacttttttctattttctcgaaggaattgtgcgaagaaggggaaaaggatttgttgaaggcagaaactgtgtgtaaggagcgtgagtgaacgagtaggtgagagaatgagtgagataccatttttgttagaaaatctataaaagagttatgtactagaaactgtgacaactggcatctatgggatgtgtctgtttgtgcggggggtgggagcatgttctctctttttaggtgtaaattagattttcttagtgtggtatgggaagaatctttgcacaaaggtacatctatcgtacttcttctacaattagttactaggacaaattgcaatattgtttagatatgtttataattttttacattagctaaatgattcatttacattatttatctaataacatatatacataaacaaaaattaaaaaaatgaaaaaacaaataataataaaaacaaacaaataaacaaaaaagatacatcttctatgtgtattgttattaccctttttttcattagcttataccgatgatacaatttcattagcatgtcttaaaatctcaaccattctcttacattcttttctacgttgaatagtggcatcattttcacgtgtcaattcctctaaatcgatctctgatccataaagtttctctaataaaactttttgaatatcattcttggatttaacaatcagttttagcatcaatgcctttggaatcaaatcagctactgtacgtttaactatattgaaataactcgttattaatagtttgataacttcagtctctaaagtctcacgttcggtcatttgtcctgtggcctttaagactggtgggggtgcttccaatgataccaacttcttcttattcttggatgaaaagaatccaccaaagaatccatttttgttatccgaattattactgttgacaccattagatgatgcagatatattatttggagtcaatggagccatcgatggttgcgatggtggtggtggttgtttatttggaggtaatggcttccctgtctttgcatcaacataaatctgttgtggttgcatttgttgttgttgctgtagctgttgtggatgcaatttttgttggaccatcgacatagcttctgaacctgtcaataagtctgggtgtgcagtgttgatatatgtttgttcagatgtaatgatatctaagacaaattgattagttggaatcattgcatttttcaaatactcgataaattcatttgaaatggcttctcttaatgctggataacgcgaatattttggttgtgaaatgatctgttttagcattctaaccaattcatcaaacactaaattgattaatctaaccgatggttcttcaaatcttctgatctgttgtttgactaacacctcaaatgcatcagtgccaacaaataatgatggtgcactacctgaactgttatacataatggtacggatatcggcatccttgatttgatcgaatggatcaatagaattaataccattcttaaacacttcatgaaaaacgaatgaaatacgtgcaccacctgataattcttggcttgatagttctttggcttcaccgtcaaggattccactatattcattagcgaaatctgtgatcataccaaggacaatcgaactggttgatcccatgtctgtttctggacctaatgaagataattcattttgatagatcttcaatgtggcttcgaccttggctctgatatcaggtagagtgtttctaatatggtgtaatagaatcgagtttaattttttggctagatatggagtaccacaatattgtgctttggaactatacgatggatgagtctcaaagaatttcttttcatcttgtaaagcagctctaatagttttgcgttgttcaatatccttttgaccacgattaattacaggtatatagccataacgtagtggaataactctacctgctaagatatcgataacatctgtaccttcgtccattaaatctactttagttaatacaccaatggttctgagtccctctgggtcgacttcacgtgccaatttcaaaccatcactattagccaaatcagtgttggcagcattaacagataagatgatcgcatttggtttagaaatgtattttaatagcatatctttgatctgtctttcaatgtcaggtggttgatcaccaactgggactttagttaaccctggtaaatcaactaaagtcaaagttaaaacataaggtgaataaattcttagattgataggaacactcgatatacctagattattaccagtgactttatcggtttccctgacgatttcttgtctaatttcatcgaaattgtagaatttcttaccaggtaaatgtaaaaattcaccccattcttctttattatcttcactttgaccagattgttgttgtttttggttgtcattttcgttagatccaacactcagatctttcaatttatgttcagcttcgtcaacattatttttcttaacaggatctttattattattttgagatgattgctgtggtttagatttccttctattgattaattgtaaaatcaatggccttctagtaacgataccagtaccacgaggtaagaagtctctaccgacaatattttccaaaacagaagacttaccacttgattgggatccaacaacagtgatttgtggtaaatcaattggggattgagacccaccgcctaatggggccaaagcgtcttgtagcttattaattgtagaaattaaatgttcatccatggttaacggttagagctgaagtgtttgctgtagttttataggttgtgtaaaatttttggggaacttactattagcagtaagcaatacaagtgatcgtgtatggggatccatatatatatatatatatatatatatatatatgatcactttatcattgttattgctgtttaatagaactttacaggaatgtttccaaatcttcttaatccacgaaaataaagagagaagaagaaagaagccatatatcccgtaccaagtgattatcaagtctatacttccaaaatattgaactttgatgtcgtggttattccctctattacgtcgtatgaaaggatattcacgcgtttttagttctttatttgctaagcctttatatatttcaaacacacataaaaattgcaaaggataaagggagaaggaaaaaaggatagggcaaatctatatttttatttaaaccctaacacacctgaagaaaatactaaaaaatatataatttttttctttacaagacctaaaaggataatttatgtagatcctagtttcgcagacaaataaagaaagatagatagaaagaaagaaagaactaaaggactattgatcactattcataagtcataaagaaaggtaagacatgattaagtgtcaactgggtgttcatcaacaataccgatataaataaaaaaaattattggtcatatcttttttttttagtctttttttctttttactgttatttctagatattactaattgattaaaaacaaccaacgataaaggaagagtgatgaattatcaaaaagtgtatggtatcacaggtccagtctccacagtaggtccaacagcagcagaaaataagctgaatgaccaactaatagcagaattaaaaaatgaaaattcttttgaaagcccagaagaaacacaaaaacgtgttgagactttgaaactattacaaactttaactgaaaaatttgtttacactgtctcaagaaataaaaatatgtccgatggtatgtcgaaggatgcaggaggtaaaattttcacatatggttcatatcgtcttggtgttcatggcccaggtagtgatatagatactttggtggttgtaccaaagcatgtgacgagagatgattttttcactgtgatggattctattttacgtgaaaggccagaattagaagagatcgctcctgtacctgatgcatttgtccctattcttaaattgaaatttaatggcatatcaattgatttgatctgtgctaaattggatataccacaagtaccaatatctttgaccttaaaggataacaatctattgagaaatcttgatgaaaaggatcttagggcattgaatggtactcgtgtcacagatgaaatcctagaattggtgcccaaaccaagtgtgtttaagattgcattaagagcaataaaactatgggctcaaagaagagcaatctatgctaatattttcggtttcccaggtggtgtcgcatgggccatgttagtggcaagaatctgtcagttgtatcctaatgcgtgcagtgcagtgatattaaacagattctttaagatttattcagactggaaatggccacaacctgttcttttaaaaccaattgaagatggccccttgcaagtccgtgtttggaatcccaagatatatgcacaagatagatcgcataggatgcctgttataacgcctgcatatccgtctatgtgtgcgacacataatatcactgaatctactaagaaaattattttagaggaatttagaaggggggttcaagtcactaacgatatattttccaataaattacattggaaagatctttttattaagcatagatttttccagcaatataaatattatctaactataacagcaatgactaattctaatgatgatgaacatcatttgaaatggagtggtcttatcgaatctaaagttaggttgttggtacttaagttggaacaattacctggtattaagttggtccatcccttcattaaaccgattgaaacgttatataccatgtccaattcagagtctgcttccagttcaaaggccgattcaagttctatgtttaaagagattattgataaatatggtacacatttaatggaatcatatttagacaaaaaatatgtgaaaataacagatgataacaaagatcaatataccaatgttaataaaatttttattactacaatgtatattgggtttgaagtagatgaagaggtgttgaaacctattggggtgcaaaataacgaagtggtcaatggtaagaataataacgataaaaagaaatataaagttgatatccatgtgccatgtacagaattttataatttatgtcacaattttaacgaagaatacaatgatactgaaaaattccagctgattattagatatgttaagggaatagaattactagataatgtatttgaagaaggtgaaagccgtgtaacaaagaagagaaagatggatttgtctaaagatttaagtaacaacaagacgttgaaaaagtcaagaaaacaaacaatagaagcatgataatgtttatatatacatatatatatatattacagactgtagataatattataatattatggcatgtgtacatttacaatatagccaagttgatccaaacaattgtagttcctctacttcattcatttacttatttatttaacctcgtttcgggtttgtttcgtatttccgataagcgagaacaaaaaagaaaaagtaaaaaaccaaaatgaagccaaaaaaaaaaaaattaagaacgaactaaaagcacagatggattaggaactttttaaaggcaaatagaaaaagactacaatattccttccgatataataattgcataaaacactccttccatatagtcatgtccatactagcctgttttaagtacttgtgagagtgtaggtgttttaattttttatacagctagccctttattgctacacgtttctcaaatttatcttttgttattcatttgtttgtttggttagttgttgttactattgctgttattgtttttttataatcttttcttttttttttttgattgctatttgattgtttggtctactagggttcgatcacatatatctatatattcaaattaaaatccagtgacattatgtcatctttatctaaattggttagtaaacctttgtcaacaactcgtgagtcatcatctaataaagtaaccgatatctctaaatcatcttccacaaatttaaatacaaaatctgattcggcttctaatattagtcgtaccatggggactaccgtggaaaatataacagaaaagcaagaggaagaaataaacacagatgatattgatgaaaatgatgatgctggtcagagtattttactcaatatcatctcccaattaagacccggttcagatttatctcgaattaccttaccaacttttattttagagaaaaagtccatgttagaacgtatcacaaatcaattgcaattcccagatatcttattagatgcacataatggaccagatcctttatctagattttttcagatcgtgaaatggtatatgtctgggtggcatattgctccaaaggctgttaagaaaccgttaaatccaatcttgggtgaatatttcactgcatattgggatttaccaaataaacaacaggcattttatatcgctgaacaaacaagtcatcatccacctgaatctgcatacttttatatgatcccagagtctcatattcgggtggatggtgtggttattcctaaatctagattcctaggaaattcatctgctgctatgatggaagggttgacggtggtaacttttttggacattattgatgagactacaggaaaaccagaaaaatacactttgacacagccaaatatgtatgctagaggtattcttttcggtaagatgagattcgaattgggtgatcatatgattataaagtcttctaaatatgaagcaaatattgaattcaaaacaaagggatttattggcggtacctatgatgccgttcaggggacaattcgtgagatcaatggaaaatccttatatgaaatcacagggaaatggaatgatgttatgtattataaagatttacgtaataaattaagctcaaagaatcaaatcctttttgacacacatacttgtcatccagttagaccaaaagtacgtcctttagaagaacaaggacaatatgagtctagaagattatggaaaaaagtgacagatgcactagctaaacgtgatcataaagtagctactgaagaaaaattccagattgaagattatcaaagaagattggctaagaaacgagtagaagacggtgttgagtggtatcctaaattatttagaaaagttaaaccaggttcagatttggattattatatatataaaaatatcccagatggtgtagataatgtggaagaacaaattaaaagtatcttagagattgcaccaatcttgccgggacaaaaattcacacaaagattttctataccagcctacaagaaacatgaattacaaaatcaatcaaaatcataagacttaaaaaaatttaaaaaataaagaaagttgatgaggtagactaaatattataattcagtggactccttatttttttgcgtgtgtgctttgtgtctctgttatactcttttcatttttttatcatagtatattaattcatgacttgtacatctgtatacctgtatgtataatatatttaggaaagtttatgcatttgacatactgttgtatgttacaatatatatatatattttcttgagatactttgatttatatactacttatgattaatcaaattgtttaaaaacacttttttgtatcctaaatgaagcaatgtttctttcattataaaatcgttattaagatcactattattatccttaggtaaagaaacaattggaatgaagttgtgtaacaattggatttgtccgtttttcgattcaaaggttttgatactttttgtccacttgtctataagttcaagtcgcaaattattaagttcaacattataaacttttaagattcgtaataaacaaagatatggaggccacattttaatttcacatttggagatataagagatcaattcctgagtcaatgaaataaggttcggctgaaaacatactacattccttgttgataattgctctaaaattggtaaatgtttagctaatctgtcaaaatcagttctatgatggttgtttcttaacttatgttggcaaaccatgtaacttaagcaatcccaagaagaggaatccgaaatattttgcaaacaataaagtttgatatcattgaagtaagcctgtttcaatgtcaaactatttaaattatcaaatatccattttgcagtgttccagcagtaataatttgcaaaatgttgtttacctgattgaataaatatttttgaattgaatattaatttttcaatatttttgttgtaatgctgattatgtatatgttgccacaaaataaacagtttcctgtaccatatgtaaagggatgatgatttattgatcttatttaaagagcaggtaagtagtcgttgaataataaaagtttcttttaataaaaattcaaacttttcgtcctcatattttatattattccaaattatgaaaaagacatcactatgtagattaaaattagttttgttttctgctgtggttaataataatcctacagtaacattgtaaaaatctatataattaacttttgtagtattcccaacaattgtgttaaaattcaagtcaggtaaatatttttctataaacttatgattttctttaaaaatggagattaaagttgatttataacaaattacttctatttgattaccctcttgaaacacttcaaagttttttccatcgctattaatttggggaattataacgagtttaaaggagtcatagaagaatggttgagatagaatagtcactaactctttactaaagttacattcatacatttcatatattactttatccaataatgaaacattttaaatgtttatcctcttatttggattttcaatggttaaacatatctctgaactagttgagaaagggctttttatcttcttctgaatataagaaagtggaagatccctaagcttgtctttgcttcattattaaacatcaagtccagtattggactttatttcgttctattttttttttcacttttgtaaaaggctgtttttaaaatgtagaaaatgctattattttattatagcagatgatgattaagtgacgcaaattaaaagaaagtccgacaaagtaattatataaagaattatttagaaagcagatgtgtgataagaagatacacatatcttaggaatatgagaaacaaatggtttttttaaatcagaaggtgttgttttaaaagcaaaaaagaaacagaaaagttaaaacaaataaaatataaaattaaataactaaataattggtttgatagatagaaagtaagaatagtggagtaggaatgatgaaaactaaaaccaataatagattttaatccacacctaaattaacaataatttcatcaaaatgtgcgtttcttaagtttgtttcttttttttttgttagctgttgtaatattagcgtttttaccctttgttaaatttacaagatgtttattattcatctcaggaatcaaaagtgctaaactaataagaagaaatgatgagacagatattgttatcgctgtttttgcaaaagatttttcaaaaggtaatgttcttgaagcaccagaatttttgattatttccagttcggtaacctgtggtgtaacaatactgattaatgtaaatgtcttattgttaaaagatgtaggactaattaaactagtagttaaatttacacaagaactggactcagttgtgaaatcacgtttatttaatgttgtactcttatctgtttggaataacattctaccaattcttttttttcttagtagcaccattcttttctatagtaaaagttttggtaatttttttaattgaagtttttgttttagtcactttacacttcctcttagtaataactttggttttggttaaaaacttagttgcagttacaatatgtttttttgttttttctgtcaaagtactcacacctgttgtagtcgttgtgacagtaattattttttccgacagttttgtttcagtagtagtactcgttacaatagtttttggaactgtaattgtcttggaactttctacaatcattgtatcagtgacagtgatagttgcatatttatacttgaattttgtgctgagtttaatatcagttgcagttagtgtgacaattctgaattttgcttcagtcttagtcttccatttctcaacatattcagtgttttgtttagttttaacgtcagttttccattcaattgttttttctaattttgtttcagtgagtgttttaggtttatatttgattacatggtccgtctttgtgacaatttcatgtttggtttcagtttcagtaatcaatccctttgttaaaattaaagtctttgtagttgttgttggtattaaaacagatattaattcagttttaaccttacattgggtgtcagtgattgcattattcttgccttttattttcgtgtttttcttggggtttttattacccatttttaaccaaccaggaaaatataactgagtattatgattgttttttttattaatcattgcttcattctccaaattttcatctagtaaattgtttttcaaatcttctaaatttaaagagtctttattatcattttcgtcaacatcatcctcaacatcctcatagactttattattatctttattatcatctttattactatttctaccaagttttttaccagtatcaatccatgaattcaataaatgtcggattaattttttttgttcaaagggtaagaaatttctaaaagttgtgccagaataatcatctgttaagtattgtaactgattgttttgttttaaagtgttctcatacttatcaaagatattttctctgatatcatcagtaatcacattgtaattattttttgtagagtgtgtcgaatctttaattgcatcttgcaaagagatagtttgctttccactacagatattttgaagacaatggttgttacttaaagtatctatgacacacttaacacattcacagttagactcatcttcaaaagtggatgggtttacaatgacacaaaaggaacaaagttgcgatgtttcattgaaattagagaggacacaattttgtaagtattcaaagttatcctgtaaacactgagaatcaatgatatcagctataggataatttagaattgaatttggacataattgctgagagttgttttctaaagaattcaacttaggagtatctttaatggctttacccttgacaagtaaaagaaaatatggtaagctggataaaacactggttgataaatacatttataaaaaaaaaaaagttccttggggaagttagatagatggatggatagatattattttgtcagtggagaagaaaagaaagttattattaactattacggagaaaaaaaaattgagaagtaatattttataactgaagtaaaatatttgtgtatggaattattttatacatggttgagaatatcaataggagataaaactaataatattttaaaattttgtgattcaatttggggaatttgtgacacttttttcagaatggggaaaagtaaataaacaattacttaaataggtaatacaaatggtgtagtacaacatgtcacataatattatgcatatatgtctgtatgtatgtatgtgtgtgtgtatttgaagagttatatacaagatggaattaaatttatataccatatacttcatgtaagcgtgtgatgtgtgatgtgtggttaatcaaaaaatatgaaagctggtctaattaaacatagtttatggttcatatcaagaaaaaagggatctgagacttcttattattgtttgatagatgggttgattgtaatttattcatttaatgtatatattcatataaattttttttcttttttcaatttattcttgtgatcttaatctttgaatttcatcccttgcttctcttttctttaaattctcgacttcttgaagaatactattgaatttttctttttgaacctttgaactaattctttcaacaacacgaatatttggttgagtgaaacttttttgagtcaagtatatagcatttggttctttttcattaaattgaagtaatttcccagatatgatattctccaaataataatctttaaattccattggagttcttaagatagttaattcataatcagagattggatagccggatttagcctgtaatcttttcacaaacttaaatttgatatttaaatcagggaacggatcgttaatattgaaattttcgcctaaaatttccttacacgatagattaatgacatgatctaaatcttcaggcgtcttaactttctgattggtaagccagttgttccaaggtatatcattcgttaaatctatctcttcctcttttcttctaccgatgatattttcaggtgtcagatctaatttcagtattttagaggatgatgattcgttcgtggtgtcttcaatacttttgccagattcaatatcttgaataatttcttttgtctttctaactctagcttcctccttctttctggatcggaaccaagacatgaagctttctcttttgtttatagtagaaaagtttctcacaaagagttgtctttgatagacatgagtttgagaaaatacaagtttctgtacatgtaaaagtttcattttttgtgtaatatgtgtatagatagatggatataaaaaatgggataaagaatatgcaatgggaggagaaaagagagaaaccgtttttttatttttttctgttctattattactatggggtaaggataaattgagtctagcaatgctgagcaagactatatgacaagttgtatgaattaagagggatagcttttctttcgaggaatttccttatagacaggttttttatttttttttttattttttattttttattttttaatttttattttgccaattgcttaatttttcaattttcctctttgactaacaaaagtttccctgcaaatattggagtagaataacgtataagtgggatgataagagttactattgtatggtgtgataagagttgtgttggggcatgcatggatttgtattacagcagtttcttgctgatcagagagtgtgctgaagtttgcagtttatttaaagcgtaacaacgagaacacattaacatatatatttatatttatatttatatttatactggtcgtttgaatatgggtgttatgtttagtagtcccaataatttatgttgttgtgggtttgcatggggttcttcatccagcgatccagatgaagaagcattgttaagaaaccaaccatatgggtacggtacgacaagtaatggtgccaatgggccgtatgatgcggttcaagaacaattaaaagagcatgaaagacggctacaagctagagaccaggaactgcgtggaattgtagctagtaccaatgacaagttaatagatatatctatgattagtaatagcgggatagtggtccaaaagagtgatctatatacagaagatatggatgaagaagagaatgacgatgataatagtgatgatgataatgaagaagatgacaatgacaatgacaatgacagcaacaacggtggtgatgacccaaatactacaaatctaatcgtacaagaacaccaaggggtaggatccgatactgctgataattcaagtaataacaattgtaatagtaaattagaggttagtacagaaagtgatacagtgccaaattttaccattttgactgaagaagaagtgacgccagagatgaaacaaactttaacagagatccatgagatcataatggaccgaataataaaacaaatcgcaatagaagcgcctcaggacctaatagtcgccttttgataactgttgatcacaaccagatagagaagaccatccacaaaggaatagagttaaggttgtcgcagacatgctcgtatgttatatatacgtccgttggcatattgttggcttgctgttggtcattagagacgagttcatgtggtggtgtgtgggtggactgatttttttttctttatccttttctttttcttttggttttggaagatgcagtggtaaagtgaaatgggaagagtgaaaaatgaggacagaaagaaagattgataaactctgaagaggttattaaggtagggatgcgatatatgtgcactgttctattctatttgaaagtattcataaacggtaatattatattgcagaaaagaaagagggatataaaataaagacctttttgatacttataacgctaatatgcctccaaagaaatcgcgtaacactaacaatgctaatggtacagcagattctaatgaagaatcaggtcgtcgtgagacacccaaatatgtagcaggtaagaatcctagacgtcaagattttgttcctgttatctatgacaaacccttaaaaccagattcagaattatatagagatctcaattggaacataccagaatttaatcggtttatatcttttactatagacaatctaattgacttatatagacctatctttaaagatttcattaaattacctagtagaaaatttcatccgcaatactattacaaagtggatcaacctatgtctttgaaagagataaaatcaaggaattatgagtataatggaggttgtagggattttttattggaccttgaattgttagcaaaaaactgtaactccttcaacgaggaagacagtttaatagtcaagaatagttatcaagtggttaattatgtcaaatatgaagtcataaaggggaaaaactttaaaagaaattacttaataaataaagatgttaaacaacgactattgaaacaaattaataaactaattgattctactgagagagaaataattaaggacatgaaccatggggataggtctggcagaaattttaaaccaagtgaaccattcttagagtatgttgatagagaagaattggcagaatattatgaggttgttcatagaccaatggccctaaatgaagtcgtcagaaatctggaatccgataaatataccaccatatatgattgtatcattgacgttttgttgatatttgataatgcacaagtctttaatgatgcggattcacctatctatgagagttcaaaattattattgaagtattttgattaccttttaaatcatatttttttccctgaattacaagattctaaagaacgtggcgaaattactcttgaatataataaaataaattatattgcatcaggcaatagtaatagtagtaataatatcaataacatccactctaatattgttactgggtttggtggtaatataaatttaataaatggtggcctaattaataaagatacagatacctctggtggcttggcacattttttgggattaccattctctaatgaggctgatgattatgatctcaatcatttagaaggacttggtaatggttacacaaaaactttgttatctgcgaatggagattatctgttgggtcctaattttagaatcaatagtagagacaataataaaatggaatcaaataaaagacagaaacttgatatgagtgaggaaaaaccagaggtattaaaatttaatattttgaaatctttgcaaaagacttttgtctctaaagatcatgaaattttgaaggaaccctttgaattaatcaaacaaatttctatttcttcttcaatggatgcatatcaacaagcagtctatcctgcaccaaattcaagaccaccatatgcacaaaattggttagattacacgtttgatatgaaaaaattaaataaacatgaaaatatgtatacattatctgttcaaccaaatcaaacatctttacttatggatgtctctttgaatatttcgaatttgaataattccttaatagtaaataatacagaagttccatctattaaacctgcaacatcatcaccatcacagcaacagcaacaacctcaagcccaatctattgataatgctcaaactttaaatcaaaactcaaaagataatgatgaagataaatcagaaagatatagtctaagtttagttgaaggtacaaataaaatacaatttaagactagtactcaagttacaactgaaatttttatagtttggattaacgtgttaccataaaagtaatatatagatataaatagtatacagtggtatgtttcacataagtgataaagatataaatagttgttttatcaaggattatgttttcaagaaaatacgttttaaataattctttgtattttcttattaactatattaaagtttagaatattgtaatgattttctaacgaaatgaggaatagatatggatggtcggcaaaccaaaatgtgattattttttttgtgtggcatactaaacattatagtttaacagtttgctaataaaaatggtaatagttcaaaatacccccattaaggtgaaatttttttcactctaatgggtgtaaaatatgttaaataagaagtatcttattttgattaagttgaaattctgaaactattgaaaaagtttttttttgaaaagatgtcgttgtttaacactaaagacatgaagagggaaatagtttcaacaatatagaaaaatatttaagataaatccatctgattaaaatttttttcatttaatattataaagaaaacagctagtgaacataattgaacagttagaggtattttaatatgttgatggtaaatttagtgagataataattgagaactattcaacagaaactatcattagataaaaatagttgaatatgaacatataaaaattatgtgtaagtaaatacatgacaaatggtaaaacattcgtttcataatataactttgaaagaagggttagtgaaagaaaagagaatacacatttcctagcttttttttcatagataatttttaattgtattatttacttatgtcttatatattcctttatgaaattccttttgtgtcttagaaaaaaggaaaaaagttcggagatttccatcaatttatactctacatatgattatattttgaaatcatagttatggcttgtaattccatcaatactttaaatgcattattttataggaaattattacttgcatatttgaataattctttgaacactttatttcaatacaatatatgaaaacttttcaggattgtattttcagcatggtggtcaagaacttttttttattcgctctttttcatgaactgcatatttttgggacgacgtcatgagctataatccttatatgatattttataatatgatcttaggtaactgattagtatgtgataatgtaagtgtttttggttttatcttgttgacgcaaggcttcggaatcaaaaattctagtagaattcattttaaactaatataataagataatgtaacttacaataggatattggtggtattataagttttattattatttatagtaggaaattagtggtactataaattgttattgtattgtttgatccttttctttctacataagtaatatacaagatacgatattatacagtatactcattttatcttcgaatcttctttaatataaattttcataacttttaatcacttagtacgatgaatttagattatcaaacataactctaatcatatttcaacatatctttagtagtatgttatttgttgatgatagagattttgagaataaaattgtgtttttgtttatttttcaaatagtagtttgtcattgaagaataattgacattttgtaaaaatatttaacaacagttgaaaaacaaaaatttcacagaaaccatataaaaggacaacgttttccggagataaaagatcatcttccacaaccgtttcttgtaaataaattatatattatatataaacataaatagaacaacaagcaagtacaataagtaacttcaaataaatatattagctcgatataagccgctcgatatataagactgttttagtaattatattatcgcctatagttgattactgtctcgattatttgaataactgttaatattatttacacttccctgaaatacacaaagaatctggccatctcatattacaccagcaagcagacagtgcaagactccatggccaagctggttaaggcgtgcgactgttaatcgcaagatcgtgagttcaatcctcactggggtcgtttgttctttggattttttgttttttcaatattttgatatcgcagcatacgaaagtgatgatttccttgtctttggaatatttgaacagcaaaccactatataaaagaaagaggtctcttattctagaacgtaagaccatggcgatttattcttggttgttatcctccacatatgatgctcttattcatgttatatggttggccaccattttgacgctcacctcaatatacgatatgtgatttatacactttgtatatccaaccgaaccaaaaacaattcatcttattttatatccatagagagtagttcctcttgtaggcgattctcatgtatcataatgaccctcgaaattgttattttgaaaaaatctctcatacttgacaaaaaaaaaaacaaacctgttcttgcttttattataaaagctatgtgttctagagtaaggttaactgttgtatttaaaataagctctaaacggttagaaattaaaatgtatagtctacactcaagagtccattgcaaaatatgttttttcttcctctgattaatgtgatgactacgaataatcattcttcaagcgttataatccatttttaaaaatcttaacaattcaataattcttcttttaccagataagaccatataagaaatgtatccatgtcatactactgagggtcgagttttcttgctttataatcaattatttctactaacagaaataattaagtattgactccttagtccttgaagaatctatttatgcaacatggaataaatatcaaattgaagacaatgaaaatagctaaaaacgaaaaaaaaagattgacaatattataaactattttctctcatttattataaccaccagattttgtgccaataacaacaacaaaaaaaaaataaatctgtatcacttattatggaccattatgaattatgttaataatatactattaaacattaaacagtcacaataagtaatgtggttcttaaacaatgacaaaatgaaaaaaacagaattcatcataacacgaaaaagggataaaagcaaagaaaaaatcatatacatttcattacatttttgtataaccatccacttaaacattttgcatgattaattgtcatactttgtaaaaaaaaaatagagtcggactaagaaatacttaatatatcattttaaattctttttttttttttttttttacgttctattattagactaaatgatacatctgtccatggttatcagttatatgaaaagtggaatgatgtaaatatcacgaaactttcatataaataaagtaaattaaacattctcaacgtaatttagtgatgtgtgcactatctaccaccatcctatagttattaccaagctgaacacacgtatatatctaccttcccatccatagaaatacctgtgtctgtcttagtaaatacttacaatgtttggctcttccacattattacaatattaaattactgtctctttttaaaaagcaactctaacacatttttttaaaaaaaaagaaaaaaaaaaaaaaagaataacctatttcgaacttttctttattcaagtttgccaagcaggatataaacagttaataacagtctactacgttccaaagaatacactgtgtcttaataacacaacagagaaaaccttcccttagtcaaacatcgtattattacatgaatgatattataaaaaatattaaggaactattaggaaccgatgaagatatagatttaaataatgttatagatatccgaaaagaatgttcctcctttcaacaatttagaaaaaaaatcaacatttctcaactatcaatagcaccagataaaataaataaactatttattctaatttctctgctagtaaaaaacgagatatatgaaactagtgatatatcttggcagaaaaaaattcaaggtattgtaaagagagaattaaaattacaggataacgaagacatagttaatgtaacagattttattatagacattttgaacaaaactaatgatgaagcacattttaagaatgaaatgattagaatggaaagtgggctagcagattctacattatcaagcatttattcgttgtatttgaaaggaaagaacttacctgctatttctaatgataacaaagtcacacaactagcttctactgataaaatcaagttagaagaagagaaaagtaccagtttggacttaccaaatgaaccagttcaatgggaggatctttcagatgtgagtgatctgtttggaggtaatagttctaaagcaaatgagataagtatagacgatcaagccactttataccatatatatgtaggaattatcacaaaagtaacaaaatttggttgttttgttcgtatcttaaatgtcaagaaacatcattgtgaagggttagttcatgtttctgaaatacctcacacagagagggcaaacaatccaattaatcggtttcataagaaccaacaaatctatgtacaagtagtgaaaatccatcctaatggcaaaatatctctctcaatgaaaaatctagatcagactaccggtaagattatttctccatgtaccaatattctggaagaagagagaggaagaaaacgagaaagagaaaataatacaaattcggaaaagaaatttgctattactaagaggaaactaacatccccagaaaggtgggaaattcgccaattaattgccagtggtactgtgtctagtgaagaatatcctgaacttaatacaactgctaaagatggtgatactgttaataatacttctgatacagatgctaatgataaatatttagatgttgaactcaatttgaacgacaaacctgcatttttgaaacatgaaaagtcattaagtatgaaaaaatttgacatgtccaaaattgtcaaagtaccaaagagttcaatgaatagagcagcaatgaatggttcgaagacaatgaaggagcacagagaagaaaaaattcaaaaaagaaagaatattgaacagttaataagggaaaaaagaaatttaaatgatcccacaaagaatcctcaacagattaaacaagaaatagaagaccttaagaaacaattggttgttacttcatgggaaaaaaagagacaaaaagaaaaagtacgtttcggcaaacccacctcactcccaatcagtgatcaaagaaagaatcttccagtgtttactatgagaaatgagttgattaaagctatcaaagataatcaattcttggtgatcgtgggtgagacaggttctggtaaaaccacgcaaataacacaatacttggatgaagaaaggttcagtaacagcggaatgatcggatgtacacagccgcgtagagttgctgctatctccgttgctaaaagagttgctgaagaaatgaattgtaaacttggcgaagaagttggttattcaattcgtttcgaagaacgaacctcacacagaacgagaataaaatatatgacagatggtatgctacaaagagaggcattattggatccattaatgtcaaaatattccgttataatgttagatgaagcacacgaaagaactgtcgctactgatattctatttgcccttctcaaaaaggctgcaatgaaaagacccgaattaaaagttattatcacttctgcaacattaaattcttccaaattctctaagtatttcaacgattgtccaattattaatatccctggtaagacattcccagtcgaggtcctttattcacagagtccacagatggattatattgaagcagcattggaatgtgtattaaatattcatataaatgagggaccaggtgatattcttgtatttttgacaggtcaagaggaaatcgactcttgttgtgaaatactttatgaaagagtcaaaactttgggtgatgctatggacgaattattaattttacctgtatattctgctttgcctagtgaaatacaatctaaaatatttgaaccgactccagaaggaagtcgtaaagtaatatttgctacgaatattgcagaaacatcaattactattgatggtatttattacgttgtagatccagggtttgccaagatcaatacatataatcctaaaacaggtatggaacaattgattatatgcccgatttctcaagcacaagcaaatcaaagaaaaggaagggccggtagaacaggaccaggtaaatgttatagactttatactgaatcagctttttataatgaaatgctaccaaacagtgtccctgaaatacaaagacagaacttgtctaacacaattttaatgctaaaagctatgggaattaatgatttattgaattttgattttatggaccctcctccaagaagtttaatggtatatgctctgaacgaattattcaatcttgacgcactagatactgatggatacataactaagctagggcaacggatgtctcagtttccaatggaccccacattatcaagatctctattagcatccgtaactaatggatgctcggaggagataataactattatttctatgttgtcaattcagaatgtattttttagaccaaaaaataaacaacaaatagcagatagtaggaaagcaagattccatcatccctatggagatcacttaactttattaaatgtctatacccagtgggatttagctggtcgttcagatcaattttgtgagataaactttcttcatgccaggcatttaaaaagagcaagagatatcaagatccaaataaccgatatatttagaaagaataatataccaataacaaaatgttatggtgaccctgatttaataagaaaaacattattgacaggcttttttatgaatgctgctaaaagggattctactgtgggatataaaactatattgggtaataccattgtaggtattcatccctcaagtgccttatgtggaagagattatgactatgttatgtaccatagtttaattttaacaagtcgtgaatacatgtctcatgtgacttgtatcaacccagaatggcttgtcgaatgtgctccgcatttctataaagttacagatgccaacagcagatcaagaaagaaggcaaggattatgccattacacaatagattctccaaagatcaaaattcatggagattaagttccattagacaatcaagagaaaaggcattgggtattaaaagataacatgacattgtccaatctattttcttttttttatatttcttatttcgatgcagaaatttagttaaaagattaataatcaaggcaacaacatctgcttgatacataatttatttttttaatagttgattcagcacttaaataattaataaatagatttttcttaagctaacactctgtttgctacaagcgctgacatcttttccaaacccagtagagcaacaaatagaaatacagcaaaacctctttctttaacgtatttcgtgttcttttctgtgccatatgagaatattgtttttatccaattattattattttctataattggtcgttcctttcgtttaagaatttcaaggaaagattagttttccaaaaatcaaagaacaatggtttcaaagagattccaacaaacaaagaagaggttaatacgagcaataaatgaacaaatgaacaaacattacaagaagctgctttgttttaaaaagtcaattaccaactacattcattaccctatgttaaacatatatatatatatatccataactgaaccttctcaaaatataataataacaataaaagagaataataatccccaaagctaattaaggctaaaaagaattaattttgtttcaaaatgaaattcaaacaattaacaaaattaccacccaatgcaaaagttggtgttgtgggtggtggtatctcaggtctcttttttacttattatctaagtaaattgagacctgatgttaacataactttaattgaccagaatcagggaagacttggtggttggatttattcttggaacacacaagataaacaaggtaaagatgtcatgttagaacgtggtccaagaaccctaagaggtatttctgatggaacagtactaatgatcgatgcaataaaaaaacttggtcactctgataaagtaagttgtattgaagaacagtctccagctaacaggaaatttttattaggaccaaacaatgcgttagttcaagtaccagactcttgggttaccttttgtaagttttatgcaagtcctcttgctaagggtcttactaaatctgttttatttgaatgggccaggccgaaaaagaaggattataaagatgagtcagtcgaacaattaataaagagaagatttggaagcaatttactgggtcaaaatatcatgagtgccatataccatggaatatatgcagatgatatatcaactttaagtgcaaaaagagttgcagctaatttattctgtgatgaacagaagtatggttctactttaaaagccgctttaatgaaattattgcatcaaagagggtcgcaaaaatttaattctgaagagctaagcccagttcttcaagcatatcaatctaacttccatggtaatgctcatgaaatatttcaactttcaaaaaaattaaagaactatccaatgttaagttttgaaggtggattaagtgtagtacctaattctatcaccagtgcgatcaaagatatgcctaatgtctctattttaaataaaagagttactcaattaatttctaaagacaaagaattacaacttgctttttcgaacaacaattctgatatcggttcagaaaagtttgatcatgtaagattctccttggtaccaaattatattcaaaacatttttagtgaagagaacaatagagagttgattagaaaattacaaaagattaaatataatactgtattgttagttaatttttaccatccaactaaagatattattactacaaaatatgacagctttggttatcttgttccaaagtctaactcaaaccctgaacatttattaggtgtgatatttgactctgtcattgaaaagaatagaaaaccattatttccaacatctaccaacggtaaccattcaaatgaaaacaaaaattacacaaaacttacagctatggtaggtggtcatttattaaatgacttacaaggaaatccaatagtacctgacaaaaatacagtaattgatcaagtaaaaaatgcattaaaaaaacatctacatgtttctgacaaggacttaaatgatggtctttgggtctacactgcggccaatgactgtttaccaagatttaacgttggattcaatgagctagctgatgagattgaaaaccaagtgattaaacaatacaatggtaatgtatcctttggtgggatggctttttctaaaggtcccggtataccagatgttgtagtagattcaatgttggatgctatcaaactaaagtgaaaccatgacgttgttatgattatgattattctaatttgtgctttttaacttacagattctctttgatagacaatactcagacatacatatatacatgtatataaaatccctcgatttatatattgatctttttaataatgctttaccacgttggtttttggattgaaatctgttccggaatgcttcaacatcattttatacttatcaaaagttactatgaaaatgtataatgcaagatctaagtcatacagataatctaaaaattttttttttcatttccttttttaacaatcaaaaccatttttaaacatattctatctataaaagttaaatcactaagacaatatatatactgatagttaaaaaaagaagaaaaagaagaaatgtcaaccatctattgaacaagtgtaaaatatagtatactaccataataaaaaaacaacaactattcgttatgacagttgatttattatctgttgaaaattttctttgtgaactagctattaacaagataggtcccatcattaaaaacaaatctggcactcaaaagacctatgatatgaagacaggttccagaagagtggacattgtaaccgagattgataaacaagtagaaaaattgatttgggattctttgaaaagtaagtatccaaatttcaaatttattggcgaagaaagttatgtgaaaggtgttaccaaaataactaatgatccgacatttatcgtagatcctattgatggtactaccaattttgttcatgatttccccttcagttgtacctccatgggattaaccatcgacaaagaacctgttgtaggtgttgtctacaaccctcacctagatctactggtatctgcgtctaaaggtaacggtgtcagaatcaatggggaatcgtttgattattcgaccaaaattactagtatgggttctttgactttaaataaatctgttattgcattacaaccaggttcacaaagagaaggtgcaaattttcagactaagatggcaacttctgaaaatttattagctgttgatggggggtttgttcatggctttagaaatctgggatcctctgcaatgtctcttgtttacacagcaataggttatttggatgggtattgggacggtggttgttattcatgggatgtctgtgctgggtggtgtattttgaaagagactggtgggatagttgtaggggccaacccaggtgaatgggaaattggtgttgacaacagatcatatttagcagtaagaggttgttcaaatgttggtgaacaaatcgaatacatagaaaagttttggggttgtgttaagggcactctaaactatgattaaaaaaagataactattttacgatatttgcctatgcacgttccctttggatcgacataaactaatacattttgatgataattttatacattttttattattaagttatctcaagtatgtggatatccatatatatgtatatcctcacctatatatatgaaacaattttatagaattttatagatcatatgccgctgataagaaaatcaataaataaatgaatgaatacataaataaataaatgaatgaatacataaataaataaatgaatgaatacataaataaataaatgaatgaatacataaataaataaatgaataaatagaaaataaattaacaaataacttgtgctctctcatttaaataaataaagacagccatcatgtccccataacccgtaaactccaattagtggcatccaaccttcaccatgtgccatattttcactcaattttgtagcagattcgattctctccatctctaaaggttttccaattgtgaacccgcgtacacataacatcccttgtcttttagtaatatcaaattgtgggtttgattcagtttcgataaattttccttccagactcaaagatatagcaccaaaacatgtaacttgtctttcagtagattttggtaatgatctgtaatcataaaaatttgtctgtgaaataggccccattaccaaagtgtcacaatataactctacacttatacgtgaacctaataagatacgacacttattaatatcttcgattgtcaatggatcatcgaattgaccactcttatatttttgaggtatagcattaaaatcaaatttagatatctggtcttgttttttcattgaatagtgtaaataaacacatcttagagatttaatgtttgatttaaacatgtttggtaaaatccctgattttaataatagctttgccagagtaaatttaattgattgaagccagtctaatctttttgaaaagaacacatctttttcatacatttctttaaacttattagcatcgataaacagcaaagttgatctttgatcgatgctattcatagtaaacgaggaagaagaagaagaagaagacgaagacgaaagagaagaatctaaattttccattattattgaacccccatggatcaatacagcaaaaactttagtccacatttgcaattgaaactctaaatcattcggattgttaattatagttaaaacatcatctgaattcaattcatgattcaaagggaatgacttaataaaagtggaaagactactaaccagattcaattggttaaaacaggtaataccatttgaatatttggaagagatattaataaatggtttcaattcatctgaattatccaatggaggtgtatattcaaaggcctctaccggagaataattacgaatcatatccttccaaagggcaacattcgaatcattgatagcatccttatttaatactattgtatcatcacaaacgataatctttgaataccaatcttttgaatcgtttagcatttgtaaatctttttctgaattaattactagaatatcaatattattgaattgttttgatcttggaaccattgtgactaattgaggtataatcataacatcatcctttttacataaaatactttttatcatacatgacacggagataataaacccaggtaaagatgtcgctggaacagtaatacccacaacaatagttgatttttgtggtttctcttctgcattattttcctgttttatgcttttgtcattatttgtattgatgttaatattattacagatcaggtccagatgttttataaattgaaaacacatgccattaatatctggtaaagaatattgtttattattaaatgatataaatgattttttacttttagttatgtccataatggcattccaaatatcaccgaaattaccatttctaattttataaccaatagacaaagctaacccagtatttaaagcaaattgtaaaggaatcataaaatttctatataaagcagtttcattggactttctaaccaccgtgacgttagcttgctgtgacaaagcaactctactcaagtctctttgagaatcaagaattggatctttaaaccaaaacaatgttaaaactatcaataacagtatagtccataaggtaatcatgatttaagacaactgaataataatgtcaaccttgtacttttcaattttccttaaaacagtcaatggataatgatactttatttatttatttttttttatttgatcttgtttctttcttacttaaagatagaaagagaattattcatatgtccaagagtagcttctaatcgtgcaaaacctaaaacgtctcagtaaaaacatgcacatacatacatacatacatacatacatacatacatatatatattaatcctcttatagtaaaaaaaaaaagggcttcgcttactaaacaagggaatttctcgaagaatcagatcttggacttgcttgtcatgtaacaaataatggcaataacaggaacaacgatgtttgctatactactagcattatactgcatcagagtataacgataataatactatcatcttcgtttagaaaagaaaatatcctttgctttatttttttcggtattgcttctcttttcttttttttttttttttgtttttcagttttcagaaatttttcgggttttgacgttttttttttattttttttatatggggaagccataaagtttctgtgaggaaacaaaaagaaaggcaacatcttattactattagtgtaccttatatccatacatagatcatcacacgcgactaccactgatgtctatgaacgtgattatcattaaaccataacgggttgttactatcttctctaaaaaaataactttattttatttttctttctcaaaccttaacaaatcctatcaatcaggtgacccttgtatatattgaatatcagggaaatatagttgtccaaggagttcatctaatactgacaatatttacttcttcttttttattaaactggaacatatctgatatatacaaaaaagttcttctagtaaggaaatcagtatatatgataattttcgttaaacaaaaaacaaaaaaaaaaataatcaactatcaataatagggctatacaagtatttaccattgttatgcataggaatatgtgacactcactttttggaaagagattttgatactaaaaggtaccctcaagtggtgatttaacatatttcatagatccagaaattaaatggaattcttaatatccatttatactataacttaaacatcctcgtttttaaacatttataacatatttgatgtctagtaaacaaatccacaaggttatttatttattatatagatttaaatcacgaagtaaaaacaaaaaagaaaaaaaaaaaacttgaaatcttcaatttctaccttgcatgttctttacaagaacattgcttatcactgcattctcctatattttgaaaaaaaaaagaaaagtaggagaatttgattttataacaatatccacttctaaggctctaatgacgtcatttgttttcttctctagcctgtattttcatctttgtaatctagctgttacttaattgatagcttacaccaaaaaaacagtcacaatattccaataatcaagttattcttttgatataaaattcaatgtcttggccatacagccctgtttagttgcatatccaagtttatagaactatatatctctctctttctttctttcttttttatgaaaaattttatattatttctttcaaaaatatatgtatgtatatctatttttttttttaattaaaaagatccattgaagaaaaaagacgaaacgtgatgactttctagacttggtatacatatatatatatatatttcatatatgctttaacagatagagaggcaagtgatcttcccatataactaagaaacatacagttattggaaatttttattctcaagattatttatatacatacaatttccaaaactcatcctgaaagagaagaaataatatggcaaaagatattatagtatctaattcagaagcaaaatttatactagagacattaaaaataaatcaaagactagatggacgtaaatttaccgattttagagatgtgactattacctttggtaaagagtacggtgatgtaatggtcactttaggtgacactaaagttcactgtcgtataagttgtgagattacacaaccatatgaagatagaccatttgaagggctttttctcatatccactgaatcaacgccaatggctggtgcacaatttgaaaatgggaataatgttggtgaggatgaagtgttaatatcacgtatcattgaaaaggcagtcaggagatccagtgcattagacattgaaggcttatgtattattgccggttcaaaatgctgggctgtaagagcaaatgtacatttcttgaacggggatggtggattcattgatgcttcatgtattgccgtcatggctggcctaatgcattttaaaaaacccgatattacaatagatggaaataacattattgtacatccagttgaagaaagagaacccgtgccattgggcatattacatgttccaatctgtgtcacgttttcattttacaatccacaagacactgaagcaaatattaaaggcgaaaacaattcagagatcgttataattgatgccactttaaaggaagaactaatgagagatggtgttttgactgtcacactaaataaaaatagagaggttgttcaagtttcaaaagctggtggcttaccaatggatgcaataactttaatggattgttgtcataaagcgtatggtatcaccgaaaggataacggatcaaattattaatgccatcaaagaagattataaaacaagaaataaatatgcctctatattaagttcagaaaatgacagatacacataaacaaattgttgtactctatgtatttgctgtaaatgaatatacttgtaattttattagtttcaattgtatagaatgctttaaatctttctttatgtaatacgtgtcatttagtttccttattttttttttcttgctaagcctactctcaactctctactattaagagaaaaaaaaagagataataataactcttgcttagcagtttatattctctattcctaatccctctttagttctgcttcaacatataaaaatgttggaacgttcctttgatatataaattagtgtcatgatctcaattaaaaaagttatgtattttcatcaaagatatgataacaacctttatagaagctattggaaaaatatcctattccaataacgaatacaacacacaatactaacaagaaaaaaaaaaaagatgccttcaattactgttgataattgtctatttgatttagatgggaccattgtatggaccaatgttgctgccgaaagtgtctggagggatctttgcaaagaacataacgtagatccaaatgaattgtttaaacattcccatggttgccgtactggagaagttctagctaaattttttcctgagatagataatagagaaaacaaagctgccgctatgttagaaagacgcatggctgacgactatactgatactgtgaaattgattcctggtgctcatgatttgttggtatctttagatactaataccaacacaggtgagacattgactaaaggtagaaaatgggccattgttacctctgcaacaccatatattgcattcaaatggtttactacaattttgaaagatgttgggaaaccaaaagtatttattacaggcgatgacgttacgaagggaaaacctgacccacaagggtttcaagacgcatttagtagattgtgtcaagaatggggggtttcattagaaaaggggaaaacagttatcttcgaagattcgccattaggaatccaagcaggtaaaactatgggttgttacacaattgggattactacctcgtattcaaaagagatcttattcaaagctggggccgattatgtagtcgaagatttgacacatgtgactgtttctcaaaatagtgacactgaccaaattgtattggaaattacgaacccattagcaaactaatactaagcagtcagttttttcctttctggttgttcagtctgtccattgaaggaaagaagcaaacaaaaaaaaaatacaatgagaaatctacgtaacaaatagtttataccacaatataagaacaactaaataagtaaataaaacaaaaataagtagaatacacctgatataaatgatattctaagtattcttaagtggatagacacagaaagagccagaaagagcctgaggtattgggctagaagagatagcaattccactaaaaaaaacatcgataattccttttactctttcaacaattatcattacaattatactaaataacatcttactatttgacaagtcagacatttctgaattatctagtacactaatttaaactcttgtctatatattcgttactcttttcttagtcatttactcctctaaccccccttttttttattttagttcgagaaattaccttatctttttcattcactgtgctatttattattgtgtcctcacgcttgacaataattatcaatatatgcaaagagatctgtggacagcgtgtatacaaaatattctcgacctcgaatttggactcactgctactatccacactttatcagtgatatccatgtacatatgaagaaaatatataatacagccgtattgttaaaaagtggtcaaaagaaagaagttaaatagaactccttgcaaaacaacaacaacaacagcaacaacaaaattgaagaaaaaccaaaaattccctactattcaaaatgcctcactacgatattgaaactgatgtttgtttattcgacttagatggtactatcatatctaccattgaagctgccgaattgacgtggttaaatctatgtaagaaatatgatgttgagccagaagaattattcaaacattcacatggggcacgttctgcagaaatattaactagattcttccctcaattagataattcacagaaccaaatcactgtggcattggagagacaaatggcagataattatatatctactgtaaaattggtcccaggtgtccatgatttgttattatctttggataaagatagtataaccggtagtagattacatgaaagaaaatgggctatagtaacttccggtaccccctatctagcattctcatggtttaaaaatattttgaaggatattggtaaaccagatgtttttattactgggttcgatgtctgcaaagggaaaccagatccaatggggtaccaattggctaaaaataaattggccaatttatgggggttagacttgaatggaacctctaacgtctccagtgtggtctttgaagatgcaccagtgggtatcaaggctggtaaagctatgggtgcaactaccatcggaataacttcatcaaacccaaaagaagtcttatttgatgcaggtgctgactatgtggtagaagatttgactcacgtttgcgttataaaaaacagtgaaactggtagaataactttaagaattactaatccattatctagataatagtaataacttcacatattctatgttctaatatcatttttcaaattgtgatataaagatatatatattgaattaagaagaataaatacacatatccattcaattctttttattatttaaattactataatattttgaaattaaagaatatagattcaaagttcagttacatacacggttaatcaccaaacgtcttcttgatatttaccttgactctttaacatcttaattatttcatgtgcctcggtttcactaatattcaaaccacggctgtagataccgacaaatgtggaatgagtatctttagccatcccttttgcatcaccacaaatataaacaaaagcaccatcttgtaacaatttcaaaatttcatcttctctttctttgactttatcttggacataaacttttggttgattaggcaatcttgagtgagctactaccatttcaaacgatccattcaacttctgtttatactgttcccattcatcacgatataaaaagtcgtttaaatctcttgatccatagaataataaatgcttacccaatttaacgttaggattcaattcttggaatctgacacgctctctaataaaaccacggaagggagctacacctgtacctggaccaatcataatcactggagtttgtgggtttgtgggtaacctaaatgtagattttctaacatggataggtaatttataaccatggaacaaattacgtgggccatccagattgtaatgaacaggcaatggattaataaattcacttttagaaactgcatcctcagggacatttgacctatttaattgaatatttcttaaaagatttgtagtgactccaaccactggaggtaatctaactttgtcatttctattattttccacaattgaagtaatatgaatagtttgtttttcatttaaggctgaggatgaaatcgaataataacgtggcaataaacgtggaatggattcaataataaagtcccatgaaactgtggtccatggctcaccatctgaaatatataacagtgcatcagcaacattaaagtaatttgatataatttctttaacaaattgatctttgtcgtttgacaattcgagtaattttgatttaattatatcatctggtgcaaattgaaccagactacgaataaattgtcttgaaactggacctgtaatctctaaataataacgtacagtggattcaatagtggtcggtgttggaaatggcaatttcatagttggatcctttgaagttagatcaaatattttatctcctttcaaattaaacgctttaaggaaagtggccacaacctcatcagaattcgatggccaaacggctaaatgatcaccagtggaatatttcatatcagaacctgagacatcaaattctgtatgaatacaatttctaccacttaagggatcaaataactcaatacttttcacaattggagccacatagggataattgatattaaaaggacctgtttgcaaatttttctctttattaaatggtactccaccagtgaaagatggtaaatattgtgacgaaggttcaccaaggaaaaccttatcatttaaattatccaaataatttatttcaaaggacgattgaaatactaaatcttgttcatcaagcttcaagaaaactttaatcttttcgactattttttcattccaggataaataatcttcatctgttgttccagcaccatcatcagcaagacctaaatcaccaatcaagttagcaccattctcctttagtaatttcaatgctgatttggcagcaccattgaaatgttcgtaagtagaattacctagaccaaacattgtaaaattaatatttttcaaagatgaatcaatttgatctaaactttttaaccaagtttcaaataacaatgcattatctggataatcaccttcaccgtaagtggacaaaaagatagaaatcataatatttgaaggtagagcagttaaattatcaaaatcatagtcttccaaatcaacacacatgacatttaatttgaatttagccattaattcttttgcaaattttttggcatagtcttcagcagtaccagtctgtgagccatagacaacaagaaaatttttattattttcttttaaaacggtaactatatctcttgaacctgacccattctccaatttaaaaacttcgtcagaggaattcaaaactaaatccttcaaaaagtctctattataataaattgcaactaaaactgcaaatagagtcaggattatgatatcaaatttgtctgccattttctccttatcgactggcttttcttttcaccgctacaagtataaaattgcaattaatcgagcacaaccaagttaactgaaacaattcactgaacaagctatgtacaaaggcacaaatgtatttcacaggaacaaatagtttgcacatcgagcaaacaaacaacccaaagtgctaataaaatgaatttttgcaaagaatcaacaaaaaaaagaaagaaaaataaatttgcttcttattttattttgacccctttttccctcgatcaaacgggttgtttagggttaatgaaaaaatccagttagggcaaaaaataattttatcttgtttatttctccatctcttttatatgaataaattaagtaattgcaaataacatatgttgtgataatgagtaatgacattcaatcagatccatttttgttgacaaggtatttgcagaactgccatcataaaactgtcacgttacttttgttattccaagagaaagaaacaaaacagaaagcgtgcatcttccagtttgtaccaaacaccgcattttcttcactagtcgaaaagaatagatagcactttaacagatctataatatgacaaatacaacgtatgtgtacatatctatacacttggtttgaaagaatcacatgccgtttcgttatactaacatagcattaataaaaaacaaaaaaaaaaataaatgaggaaagaattaggatgatatggatgcacattcattgtttgtaaagactttttatttcttttttttacttcccgtctttatttttttttgtctggctattcatatcatctcaatattatgatgatcttattttttattaagtgtaatctttatggataaagctacgccagcaacattgacagagttcaaagatgctgtatctagttctattatatcaattgagtccaattgggctttagagtttcgtacatacagaagtcaagtgaaaaaaaaagtaaataataataataatagtagtactaataaagaggaagaacagaatgaaagtgatagaaacaatgtattatatagtctagcattcccacaaaggaagaagaatgtattaataaagaataagattgcgattgttacaacgacaagtttagatgtagacaatgaaaatactaatccaaataccaacagtgtaagaagactaatcgattcatgtagtagtgcgtggtacccggaaacaattgataacataatcagtaacaagctgtcgaacatgtggattcagagacagttaataaaaggtgatgcaggtgaatcatttattacacaagatggattattaattaaatgttgtaaccttttttcgtccttcggatttaaaggtttacttattgaattaaaagaagcaccacccgcaaacaacgctcatacagccactatcgatgacaattcacattttacaatctgtgttaaaacaattttagatatattaaaaacaattggtataaagacttacaaaatgtcaaatgatacattaaatgaggatgcaatgtcacccacaggctctaatatagatgaaaatattgaactatgtaatcttgcatatcaatatgttaatgttcttgattaatatagacactatatatatatatgaatgtatatccattacatatgatactatctgcgtatctttctatattattgtaactatgcctggcttataatttttttttattctttttaatttcttttcttgccggagaaaaaaaaagaaacttttgcaaaaaagaaaaaaaataaataagaaaaaggatgctaatagaaggatacaaaagaccaaataaatccaatgtagaggtgtatgatgtatacacacacttatacctacgatatatgtttgagaagcgcaactaagaaatactaacttaaaaaataaacaacttagaatattgtaataaaactactgagtacccattataaaaatggtatgtagacctacaaataattcctcattcctacctttcaccaattttttctattccatagtaatgtaatacatatgaacacacacacgcatacatatatatatatatatatatatatatatataatggatgtgcttatgtatatcgtttattaatgttcgttatcctttattatcatatctaatctaatttactaactcgtcattaactattgcatatatgttagcatttttaacatgttattattatttattattattattatcattaaatttttatagtcagctcaaagcaacggtattgccactttacttaaagcagaaaaagaagcacaaaaaattgttagtgaagcaagaaaatatagacaagagaaattaaaggaagctaaaaaggatgcgtccaatgaaatagcacaatataaagcacaaaaggacaaagaattgaaaacccattctgaacagaatgaaggtggtcttgacgatttaaaagcacaagctgaatcatctatccaagcacaactagaagaaatcgaccaaattacagaaaataaaaaacagcaggttgttaatcttttaatcaatgctgtaattaacccagtcggtgggatgcacgtcaatgcttcttaacggctctttttcacatttttttcctttcttagactgatcaactatacatatacatatatacacttataccactacatttcatatatcacatatatcatatctcatatatccattaatctatagctcataacttattcacacacacttaacttgaatagtgttgtctatataacatttcagtcttttttttttcctcctctctgaagtcatagagtcacgtgactgactgaagctcgagctgcgaatttcgtcgttttgttaccgctttgggtaatctacctgattaaacgatgttccattgttctcattttcccctgccattgttttgttacttcttgctacaatttctctcaaaaagcgataaacagtcttcagataaaactgtatggatattattcactaaacaagaatatttgtataaatatacaaatatatatatatatatatatacatacatatatatgcatatgcacaccaacctgtttaggatgctaatatatcttgatacaattggattaacaaatattattccaacatctctgtatttggcattttatttttgttttaaaggagactggtacaatcaatgacaatatattattcccctatacatacatacatacatatatattgtcatcaattttatgctttaagtctagttgttaatatcattgtctattcatgaataacacagtggcatacttatccacattcgctgtggcttactttatatataaatggatatttacttgctcaactcttaagggtcggcccgtacaatttaaaataccagaagttccaaaagaaattgaaagtaattgggttccatctaaagaaatctcaactaatgtaccagaaggctacatcgaagctagatgtccagctaccggccaatttttgggtaactttaagtccatggataataataatatcgataatttgattgaaaaagctgccattgctcaagctaatttcaacaagaataaagaggatcaaaaacgcttatgggaacaaaagttatctatattgatctcattaagagacttcattatcaaaaaccaagatttaattgccagaattgcatgtcgtgattcaggtaagacccgagtcgacgcatcaatgggtgaaattttagtcactttagaaaaactaaattggtgtatcaaacatggtcataaagcattatcggtttcaaagagatctggtccaactaacttatttatgaaatggtataagggagctgaaatcaggtacgaacccttaggtgtcattgcgtctatcgtttcatggaattatccattccacaatttaatgggtccaattattgcctctatcattactggtaatgcaattatcgttaaatgttctgaacaagtcgtttggtcctcaaactatttcattgaattggttagaaattgtcttaccgcctgtgatgtagatcctgatttggttcaactattttattgtttaccaccacaaaataacaaggatgattctttaatgttggaacctgccaactattttacctcccatcctggtttaaaacatataacgtttattggaagtcagcccattgcccatcaaattttaaagtgtgcagccaaatccttaactccagtagtagtcgaattaggtggtaaagatgcatttattgtcctggacagttacaccgatttaccaactattgcttctatcattttaaggggtactttccaatcggctggtcaaaattgtatcggtattgaaagagtaattgtatcttctaaaaactatgatcgactagttgaaattttacatgaaagattgttaaaaaatccattcaaattaggatccgacatagataatgaaggtaacaaagtagagaacagtgtcgatatgggtgccatgatctctgataacagattttcccaattagaagaacttgttaaagatgctgtaagtaaaggtgccagattattacttggtggatctcgctatcaacatccaaaatatccaagtgggaactatttccaacctactcttttggtcgatgttactccggatatgacgattgctcaaaatgaagtctttggcccaatcttagttatgatgaaaggtgactccaccgatgattgcatcagactggccaattctgcaccatttggtcttggtggttctgtctttggtaatgatttgaaagagtgcaattatgtggctgacaatttacttactagtaatgtggcaatcaatgattttgctactttctatgtgtgccaattaccttttggtggtataaatggttctgggtacggtaaattcggcggtgaagaaggtttattaggattatgcaacgcaaagagtgtctgttatgataagttaccatttgtttccactcaaatccctaaacctctagattacccattaaacaattccaaagcatggagctttgtgaaaagtttcattactgcatcttatacaacatccctatttgaaagaattaaatctatatggacccttgctcaagaaagtaaatgaagaagagtatataagcagactgtaataagatgaaaaattactattatctttaattcttttttgtttttttcttcctttattaatgttatttttttttaattaaataatgacatagacatgattatatatgaagatatatatgattctgcattcttaagcaactattcgtcatgtctagtgttcctcttatttttttcttttttctttttttttttttttttttttgaaatctccctcttttgtaatagtttacattcattattatttacatgtaaaaaaaaatagagaatattattaaaaggatatagttaagattttttatgaatttaaaatattcttctccacatgtttaaattgttcttgtaatttattaacataatccttgtgtaaagcttccaattctttcatacattttttaacatcgtcattttgttgaacttttttaagtttgttcatataatctcttctaatgacacctaaagaataattcaaattagaattcttaaaattttcaaaaatttgtttcagttctttaacttgttgcaatctggattcttttgtctttggtggtaaagttaccttcaacatttgctcatttgggtcattggacatcttttctggtgttaaattcaatcctgaagccaaaatgcaactaacaactttcttcacatcatttggattaaagacactcaccaataacatattcttacccttttgagtggttgtggccacttcagtaaatttcgtaccgtttgctagttttaaagtatcgaagatatgaacatttgatataccctgtttacattcattcaatttgatctcatgtaaattaagagtcttatcgaatttacttttagcttgatcgatataatgttgaatatccacgatgtctatggactcatctttctctactttattatatgacttcttacctttgtcatgcttattcttattctttgcattaagaaacaaagttgtgtggatatgtctttgctttgaaaagactataaagtcacttgttggtaaaagtaagactcttcttaacatcatattttagtattttcaaaatttcaaaatcgattatttgatcttctttcctcttaccaaattaattttctacgataatcttagatagttatacaaacacgatatatttcaatctcaaagttcagacttgattttgagacagcttatggttctgtggaggaattgtcttgttgtcaaaggatgatgtaattattttttaaatcttttcttcccctttgttttatgacgactttttattattttttttttcactctcttaataacgttcctatattttcacaactaaccaaaataatcagacaaaaagagtgatatttcaaaataaatactaatattggcattagttaactatataatatatgtatatacatacaaatagatctacatagagaaaaagtgtgtgtattgaatattttaataagtttatttttttggaatattattctttttttgttttatttctaaggtaagaaaactctcgttgtgagtaaaccaaatcaacctacacatttgtttattagttactacaatggattaatcgagacttatttatttgccccccttttttttatctttttatatatctttgtctgatatttattcataattggatgggtatttatgactagttatatcataaaaattctctttaatgtttctaatagaaacaaatctattcaatatgtttccactaccagatttatcattggtaccactcattctggagccaccaaaccattgctgagccacgactgcaccagtacatttatcattaatatagaaattgccagcagcaaacctcaacttatctgtagccagttcaataattttacggtcgcgagcaaagattgagcccgttagcccataagtcgaagtttgatcaataatatcacaaattttttcgaattcagcatccggatactcatacacagtcaatattggaccgaaaaattcctctttcataaacttatgggtagggtctttgcattttattatagttggcgagacaaaccatccattacttttatcgtattgcccaccgtagattatctccaaatttggatcctttttagcttcttcaattgcattagctaatttattgaaactttgctcatggatgactggacccaaaaatccatgtaggtcacctccactgagtgggcttgcggaagtattgagtggaacacacttagaatccttttcagataagacaccgagcatatcgcctaagaattcatcagagatggattgtggcagatatagtctggaagttgcagaacatttttgaccttgatattcgaatgcgcctcttattgtgttaaataaggcattagccatatttgcactggaatgaaccaggtggaaatttttaccaccagtttctcctacaattcttggataattcttatatttattttcaatcatattactattaattttaccagacagttttttgaaaacgtttgttgaacctgtgaaatgcaaagcggcgaaatcttcgtcattaatcaatctctctgaaatagtttccgcatcacctggaataaaattgatgacaccaggtggtaagccagcctcttccaaaaccgtatataacaagtaatttgataagacggcagatggagaaggtttccaaataacagtattacccattaaagctggagctccaacaagattaccagcgatagcggtaaagttgaatggggagatagcataaacaaacccttctaaaggtctgtattcagcagtgttccaagtacccttaatatctgtagttggttgtttttcgtaaagttcactggcatatttgacattaaatctgaaaaaatctgacagttcagtgatacaatctatctctgcttgataaacgtttttcccttgacctaagatacatgaagccaacatgtcatatctatactttgtagacaatagatctgcagcctttaaaaaaatcgaagctctatggtaaaagggtaacctaaaccatttttcttttgcttctttagaagcttcaatagcattttcaatatcaattgatttagcctgtgtaacttttgccaagacttgattatggttagcagggttagtttggtctaaggtgttatctgaatggaatattctttcaccattaacaaccaaaggaattttcaatacgttatcggaattttcactattgttaaatttaattaaagaggcacgtagaagatcccaatctttaacatgatcacttgcaaaggatttaatgggttcattttttattaaattatgtgggacttttaaagcatttaattgtagtatttgtttagtagctttgaacattgtgaaagtagttttatatatatatatatatatatatgtctgagaatgtatataactatgcttttataatgatacgtatgtgtgtgtatatgctgagatatgaaacaaagttgtcctttatactttttccctttatctttgtttagcctaattgaatattttaacttctacctctatgtacttattttctgatttagatatttgtttacatataaacgtatatatatatatatatatgacaaagaaattaggggaggaaaagtaaataatgtctacgaaggacaaaaaaaaacaagaaaaatcgaagttgaaaaattattattaaaaggaggaaagaatgtatgtttagaaaccaaaacctttcatatatatatatatatatatatatatatatatatacaagaaaccaatgtttaattagattacaatcgataagtcaacagattgtttattttttttatttttttaaataattgactgactgactgatcaatgaattaaagcatctaattaatctattagtccatttattttctgacaaggtataattgataagataatccattgaaaatatagtacggtatacaacgttggatatatgcatctgtaaatggcttattgaatcaatgccaatcaatttctgtcttatcttttttgtttgtttggtttttattttatcttgcctcttaacactggtaattcattatgttatgttatgttaaattatgttatgctatattatatatatatgcccggaagtcggtttccgaatataagaaaaagaaagaaaaaaaattttgaagccaaccaaacataaaaaaccttacacccagacacaccgtgaattttgaaataaaataaaatgaaatgaaaaaataaaacaaaccaaaaaagcaaaaacaaaatattggtgaccatgacaacggtgatgtatatacctatttacatctcgatccccatctatgtccatattcttttaaaactaaatattatcaaacaatcagttaaaaagaaaatatttaaattaatataataaaggttcctctataataataccttcgggtcgagtcctctctcttcttcctcataataatatattcatacatatatatacgtacacacacacacatatatatatatatatatatacatttattctattctattctattttactgtttcttatatccattaccataataacttttggctctaataaaacccattgtaaaatttgatatgaaaaaccaaccaaatatcaaaatcaccgccacaataagcgtttttatgtttaattcagtaaaaaattcattaatcaacgaactcaaaaacttaatcaataaattagttctattcttaatcaacttgctattatctctatgccaacaaatccaccagtcttgacatatctctgacatttcaggtaatttaaaatttatatcgcaattgtttaaattatattgtagttgacaattttgcgattcattgatcaacaataacttattttgataccatatcgcttttaaatcttttgtcatcgaagatattattaaatatattacaaacactatcgaaccaaaatttaatatccattgtacatatgatatcgtatcgtaccatttcttaaaatatggtgttgagtttggtgaccaaggtgaaggtaataaattattactattactattactattattatttctatcactattatcatcatcatcatcattattattattattaacaagtcccataccaggatgatttccaggatggaaataattatgattatttatattaacattaattaattgtttatcggttaataactgtttccatatctcattattagatcgtatcatatcataattatctttactattgatattatccttaattttactcatcctactatctttctttactacattattattgacagagttcatattatctaatgataattcaaaattattgttacctctattattattattattattatgatttgtaactaatgaagcacctaattgagtgggtgataataatttagatactgttgtgagagcttggctattttgaatatttgtgtcggtatctttagaataaacagactcaacttctgataaatagtcatcgacaatactcttttctcgtggatttccctcacttaccttttctttagattcaatatcaacagcaagattaaaattatcatcttttattaaacctatatgcttatctttattagtagaatttgattgggtttcctgagccacagtttgtaggtcctctaaatcaatattcatatctatctccattggttctggcataatatcgttattattattattattatctaaatggaaatttctagtcatttcttttagacctacaataacgtcattatccaaaagtatttcattatttcgagaatgatcataatctggaattgtatttgtatctgttaacgaaagatttaaaatttttgaattcaacttgatatcttcatgatcgttatcttcaagagataaaagtccgaattgatccatattttttttattagtagcaatattgtgtatgataatggaaataaacaggtacaggttatgttgaaaaacggtttctttacattaagtataccatcacacttagtaaaaatatgtttgtgcttattctttgatattttttttttcttgatctttcacaaagctcatcccacctatttttttttttcttttattcttttattctatcctaattcaaaatgaaatattaaaaaaaaaataaaagaagaacaattttttttgtgcttctcttcgaaccttcagggacgcttttcttttcttccaaaaaaaaaaagagcaaaagagagaaagaaaaagagaaagaaaacgaaaactgctctgcggaacaaagttctacaacaagacgaagaggaaaaaagagaaaaaataaaaaattcctagataaacaaacaaagacagaaaaatagtttgatattattttttttatattattctattatatttcatttcattttttgttttgtgttgttttgtttttctgttcaccaattcaaccaccgttccacaacaacaagagaaacaaaacaagacaaaacaagcaacacaaagtatacggaaaaaaattgttgttgatgtttttttaaacgacaacaaactttgttaaacgacaatcgtttaatagagacttctcacgttcacacgtgattctaagaattgttttttccacacctcgaaaccttaggcaccacaaaacaatagtttttctgcaaatcatttaagtttatccctattgtcctattgttacaatcacgcctaccagcgagggaccaatattttgctattgttctttcttcgagtgtttcgtcagttgttttctttttttgtattttgtattttttttttttttttttttttttctgttcacctgttccttgagagaagaataagactaagagttacaaaaataacaagaaaagtttcttttttgtttgttttttttttcctaatttttctgctttccgcatagataagtaaaaagattattaattagcaaaaatgcttgtaaaaaaactgatatattaaatctaattactcagcaagtctaccatttgatttttttttaaccttatataagtatgtgatatatttgatcgatacacatacacacacttcacatacaggaacacatatgttttttctttcttcttcttctttttttctttttcagtagcttgtcttcatcgcatctgatcacacttcgacagtatctcattaagtcgccaaagaatatcaattgtgaataagcttcccttttgaagaaaaagagagaaacacgaaacaaaaaaaaattaacgaaaaaagatgaataacgctactttcaacagtacaatcaaactccacgaaaccttatggtcttctactgaaccagtcattcaattaactgaaagaccaactttaattgaaggtatcccagatggcatccttgctttgattgccccagtcgttgcttactggaccttctctctcttcttctacatcctagacgtcttcaaactagctgaaaagtatagaatccatccatctgaagaaatgttgaaaagaaataaagctggtagattggaagtcttaagagaagttatcttacaacacatcatacaatccattgtgggctatgccgcttacgtgtttgatggtccagaagttaccggttacgaattgaattctatgtggcatctaaagcaatggttataccgtatcatgggtccacaattagtcaacacttatatcccagacaactatatttactatttctacacttatggtttctcttgcattaagattttcgctgcctttgctttcattgacacttggcaattcactttacactatgctatgcattactattccgcattatataaaagattccactcaagacatcaccaattatatgttccatacgcatacggtgctcttttcaataacccattcgaaggtttcctattagacacctgtggtactggtattgctatgcttttaactagattgactcaaagagaacaaattgtcttattcactttagctactttgaagactgttgatgatcattgtggcttcctattaccaattgatccattccaattgattttcccaaataatgccatttaccatgacattcaccaccaagaatggggtcttaagttcaattatgctcaaccattcttcactttctgggacactttgtttggtactagattcccagctatggaaactgaattgaaaaacaaaaacggcaagagtgtttctattgaacaatacaaagctttcttgcaaaacagaggcaaggaaagagctgaaaagttagctaaattaaaagaaaccttggccaaggacaactaatgaatctcttttttttttttttttttttcaatgaccttcacaatcactttgatttttctttttttctttgttttctatttttgtattatttttttggaatgctgatctttatcttttagaattatatatagacgatactatttatctagttacttatttacttgcttacttatttatttatttatctatttatttatatattaaaatgttgtattttatcatgatattataactcatggacatttttcttattgttaccgtctctatcttttatgctttgataataatttcatttggcgaattaggcattttctcaaagatctagaactatccgaaggactttaatttaaaaaatttgcaataaataaaatatttcaagaaaaaatatactacagtgaaaaattgaactatttcaacactgtaaacgacttttttacttgttttgacacacaccagttactctagaacaaccatatcactaatcttcatatatacatatatattcagaaaattattattaaacaaggtggtcttctttttttttttatttattggtcaattttatagatgtatttaactcctttagatcagataaaaactgtggaaatcattccaattccattccttgtgatcaaatctttgattgtatcaccatctatattgcaaaatgtgaaaatatttatcaatctatgccattcagataaaacccctgaacctaaaaccccgtttaatccattaaccacattcacacaaattatgaataatgagtgggagatcccaataattacatctccacagagatgggatcatgataagaagggacaaaaatgtcttgtttacgattgtataataaactctaaatgctgtgatgatttaaacaatgtcgatgcattaaaacaaatcttgattgaatggtgtattgaaagttgtgaattatctgacaatttaataataaatagagagcaactcaaatttcctaaattaaaatataaaggaccagatggtcctgttccattggagttcaaaacctctttaactgataatacttatgattcaacaaatgttgagcctttagataacacttttacacagtggaagaatgaccttttatttcaacaagaattagaagatgaaagaaactcattgaaaactttgtttcctcaacaagagaaaactaatataattccttcaaatccattaatacaagaaatttcaacttctgaagaaatagctttaaaacgaaaccagtcccgatcaccaataaagatttcacctaagaaaaaattaaaattgacatattctgtgtcaatgagaaagacgtttaacactgagacatggaaactaagaattgagattgatatattaaatgagaacaacaattcaataaatctaatagatgtgtctttgttccatagtcaatacgatccaaccggtaacaatttaaaaatatataacgacgaaacatcagacctcaaaccaaatgaaatcattatccctttacctaatttatatgaatcaatgaccacttatgttgaaaaaagtaaattatttttcctcaaagataaatcaaaattgattatctttatataaagatgttaatgagatacctaatatttatcatatgtgtagataaagaacagtataaaaatatagaacagaaagctaagacatttttttttttcttttgagaggcatacctgtctaaaatggtgttaatgccaagttttctctacttgctacaactgaaatcgcagatgtattactacgaacacttggatttgaattggtggatggaatactattattttgactaaacgttatataattgtctccataatcatttccatgatcacgactataattgttataattatgcttaagctttttcgttaaagatgaactgatgttattactgccacaaagtatattctcgatttctttatcttctgttaatcctttaatcttttttatttcatcacttgtataatttaccatagctctccctacagttttcaaaggataattcggatctagttcaccattggctaacgttttaccaatcttgacattaacacattccatttcatggaatctgtcttctacaccaattataccatgaacatctaacccaccagaaacaacattaatatctttactgctagtatcttcagaaattctcccataactattcttcttttcatcattgttgtgtgtatatttaccatcatttctattcccctcttctccatcgagcaaggggttactaatctggatcattccttcatttttattacaggggtgatcatgggtgttattatagttatgattgttattctgttgctgtttataacggttttgagcaaccatgtttaattgtctatatgtcttttcatcaataataatagatcccttagtaacaagaccatgtaagatccaaaattgtctggactccaatcttttatcagggtcattggccaaaaacttagtgtgtaatggaatatttaattcattcattctttccagttccacttcattatcaatattgatagaaaaatcagtatttaacatatatgaaagaatattattaatcttttcaggtgattcactatttaggataattgtgtgtacacctgaatttgtagctagatctgcagcaacaatttttgtcttcatcccacctgtaccaatattggtaccagatccatttgagatattaataccatttaaaggattttcattttcaccattgtttaaatgtaaattacgtatagttaaaataggtttcgccaagggatcaatccttggatcatttgaatacagacagtccacatcagttaaaagaaataagaaatctgcttgaattaaagctgctgtgacaccacttaaagtgtcattatcaccaaattcaatttcgcttatagataaggtatcattttcattaactattggtgttatgcccatatccaacaattcaataatggtgtttcttgcatttttaaactgcttccaatccaaaatatcatttctggtcagaagaatctgtgcaatttcttggttatattcttgaaatagaaggtcccatctaccgattagtttgctttggccaattgctgcaatagcttgcacttcagagacagattgtggtcttttatctaaattcataacgttaagtcccatagcaataccaccactggacacaattacgatcctgtgacctttctttttcaaattagtgacggcttccactgtttttgtcatactagctaatttcaaatctttggtatctggatcaattagagaggaagaccccaattttaatacaatagtatatttttttccatactgttcttgtgataatttttagtctttcgtatttattcttactaccctctttttaaccatgtatatatttaaaatagtaaccaacaaaaatcaatatactgtctatattgatgtataaaggatataccagtttataaaattaaacaaaaaaacaacaactgctattagtgtttatatcatgtttcatgtgcaatttctgaaatttacaaagcttgagagggggaagcaatctcctaatattaagcttactgtctcaattaacccaatcttatatctttatatatataaatatatctatttgtcaccctctagtaccttctattactaccttgcacttaacccatgcttgttcacataatttgaagttctttattgcatcaaatacgtcataatgcctaaaggggaaatagcaacatgaacatacaaattgcttttttttctactgctaattttacatttcgattccactgccccccttattttctttctgacgtcgttgtttcttcttctactgccatttgatttcgtaaaagagtcaaaaataaaaaaacaaaacaacaacagaaaaacggcagaaaataacaggagaaccccttttttcaaggcaaatacgtcattggaacaataccaacatacagtttctttcgagtgaatgaaacaaaaaaaaaaagacaggtattaaggttagggctagaaatagaattacggttagggccagacttaaaatccggggtctgtccttatttttatagtgacaacagggtttgtttcccttttatcaccaagttacggcaacgtttgtacacaaagtgattaaaattgggatgaccaaaagaaaataattgcgtcaagcttcgaagggataaaacattacaaccataacattaatatatagcactgttgctcttattctcattcttattcttgttagtattagtattaacaccagtattgttattatctattattggcaatgttattgcatgagaatgttgcaacaacaataaaaatattgctaactctaaaataaagaaactaaagaaagatacttttcttgttttccatttatagctttcaatcattaataaaccatattataatggataaatgaaggatgtctaaagttaattaatggttacatgctgtaatcagatggaagaaaagaagacatcaaatacttttgttacattctgaggtgatatactaaaaccactcaaatcgatttctttattctctgacataatgtttgtgttaaaccatgaatctaaatcggtcatatggttcaattggcatgcatcgattaatctatgattcaaaatcttcaaatatttactataacgacctaaactatttaaatctgtaatagatctaagaccattgttactattttgaatttggatcaaatattcttgctgtgtaatcttcatatatttgctttctagttggcgattttcataggataacaaccctgtaactttatccttcaccaaggattcattcgataacaagtggctcttaatattttctttgtaccctattctactcaatataataaatattttggttacgggtctgaaattctcaatgtgattgaatttattacttattggagaactcgttaatattatgtataatataataaatagatgtttgaagttttgatttagtgtatttaaaactttacttttatcagtatctttttccgtatcagccacacccccgtttatcttatatctttgataattttcaaaattttggaatctttcatatatggaatataaaatatctaataaatcttctaataaatacatctttcttctaataaatctgaactcatattcagaatactcttcaacatcctcattctttgaatccaatatctcatttgccttgacagtactcgtgtcttctttattattggagatttctatctttgcctctactgtttcttcagtcatattatccttgtgtacagaaggaaatattaataatattattgggacaataactgtttcaaataatctatcaaactgtctaataatatgtctgtcctctttcaccatttctaattgtaagaaaatcaaatattcaaggtgaagttttatcttataatattgtaacgaattatcgattctttgtgaccctctaaattcgtaattgttacatctttcatctaacaaatcaaaattttcatcagcccttggcagattcataaatttataatatttattatccatatcttttattaattcacttaatttatcaattgtcctatcagcaatagtttcgctgtcatccatatacaaataattaatgatttttaattgtgagacatagaaattgtaggtatcaatatcactgacatcatcattagaataaccaatgtattgactacttttcttatcttcataataattcattgatgctaaattcttcacaaatagaataggtattttaccctcaaagatttgatgttttaaataattattcgatatcactttccaataggatttcaaaaatttccccccagcacttttaatattattaattgaaaaatgtaatgctaccattatatcctcattatagtctacattatctatagacattggattatcatatttgatttgatctaataattcatataatgtcataaactttaaaatgcctttgattgtattttcattaaagttgttcataatttcattaagtaatcttttttttattagaaacaatgaataaaacaacaaatatctgttttgttcaattgatgtcatcaactttgaatagcttggcttactattttctttgtttatactgaatttattactataataaaaaaataatacaattattataacaataccaatgaaagagagatctttagtagtcataggtttcataggaatttgaatcaaatctcctgaaatttcaatagaatcgttcaataatttaataaccttaaccatccaattactaacactgaaatctaatattggataaaaaattttatttgcatttggcatagttttacaacttatttctaatatctctaatattaaattaactttcagtagttttaagtaatcgaatgtataattatcatgatattgacaatttaatattgtattgcaaacatttcttaccttaaatttacttcggtaatattcattcaaattaggtataaaatctattttcataattttagtcatgtcttcataaaacttcgttaaataatggtcacgaagtataatgaaatttctattcagcttagagtcttggcccttcgattttaaattgatcaaatttaaatctaatgttgttatatttaaataattatctattgttggtggaaatttggtgttttgagcgttatccttagatatacttaaagtttcatatggacctaaaagcgttaatggtattttattgttattaaccacatcttcactggtgttaatcttagtggaaggcatagaaccagaatcgaccttttcaatttttcttcttttcaaattttcttgttcatcttcaatattatttgaatttggtttagaatccatggttttatgaacagtagtagatgctgcagtattattatcagaatattttgatttatagtataataattgaatgtatctatctcttaagaagtccatttcttttaaaagaatttcttcttgtgaataaatcgaagtcatcaagtcataaaataccggtacagattgattcgatatagaagaattttctaattcgttactttttttactattttgttgattctttttgttcttactggaataggtagttgaaatatattttgcatcatatatgttagatacattagttggattaaataatgatggtaaagaatctaagtttgcattcaacagctgtactctattatcaatttcttgatttacatttccgccaagtattgtgttgtttcttatagtccttttatgcgggatagtttccaagacatctagtaaattttcatttaattcaactccatcaatttgttcactcttcctttgctgtttataagtatctttgataggcatggtattaaattgatcagtagataattgggtaccatattttgacggtacagaaggttcttggttataattactcgtttgtaaaggaatatttgttccagttgtactatttagtagtgggccataatatttttgaattggaatattaatacctatattgctgttattgttataattgttgaaattgtctggcaaggagccaaaattttctaatgtaacaggattcaaagagctgttattcatcacatttacacctatctgattattcacggtatttctgttagagatcattggggtagcaataagtgtatgattgtgataattaacattatggttaatagtattatgcgtgttatacatattgttgtatgtctctacagttccatacttcttttctggatatatacagtcttgtctatttctcttgacacaattcccacatcttggttttactctatcacaaccaatttttctttggcgacattgtctacaagctggtgtttttttttgttttggtactttataactcatatttcgaccactagatttttgtttccttctggtatattcaaataaaatggttcttattattttacaggcgatatatttaaaatgaaaaaaaataattcgttgtttatccgacaataaatagcaactattgaaaataaagaagcactaattagtataacaccaattgttctatttgatataaaataaacaaatgaataaaaatagataaataaagataatgttacaacactaggtgcatgtgaatgtagtgttttattttctttttttcctttgtttatacatgttactttatttctacctaataattatctctactgtttttttttcatcgttgatgctgaataaaaattcactatttgcaataagaataaataaacaaatattgaaaaaaaaaaaactgcgacaaaaaattcaatgttcagggtaaataaagcaatcattagaagaggataaaacaaaatttaaagaaatacccagacctcatcataatggaataagtacatatggatatatacatatttatatagtaaagattgaattttgtataacttatttaatcaaaccaaattttcacaactgaagaaagaaataaataggaattatatcaaatcggaccaagtccatattcttacaattcatcatatttggagcctttgtttggtttagaggtcttaccactcttgccatttacgatttccccagtagcgctaatcttgactggctttaatggcttatctcttctatcagtattgacagactcaatgtatttgactacatccatgccatcaataacttcaccaaagacaacatgtttaccatctaaccatggacatggaacagtagtaataaagaattgagagccattggtatctggacctgcgtttgccatagataaaagacctggcttttcatgtttcaaatcgaaattttcatcagggaatcttgcaccatagatggatttaccaccaataccagaatgatgagtaaaatcaccaccttgaatcatgaaatttggaatgacacggtggaaggtggagtccaagtaaccgaattttggatcttgggaaatagtcaattgataaaagttttctacagtctttggtacaatgtcaccgaataatccaaatgtgatacgtccaattggcttaccatcatgagtgatatcaaaatagaccttatgggtaatagctggttggttagcagcatttgcattgtttttagtgttggatcccttagcagcagaggctaactgggttaaaaagaaaattgcaattgtaatataacttaagaaatctttcaaaaacaacatagtaagagattacaaagtatgtgtacgtataactctttggctactgaatgactgttaacaaaaattatgattaattaagcaggaatatagggtgagagaagtaacttgctactgtccttaggttttaatgtgttcaggacaagagagtgatattttatatcttctcactcttttttgaataacgcttgtcccaagtttccccacacaaagaaacgaagtggagagatttttctcgaattaaatccgcacaccaccgcatacatacaagaaacaacaccaaaaggtaatttacagatttaataataatggtttaatatttttagaccccactagtgatttttaaatccttgtaattactgatatcttctttgtatcttttacatattcaaaaaagaaatatttaaacgtttattatattataaattatgttattttttcttggtagtgatagcaaagaacattgtgattactaactaaaatcaaccttcaatatttgctatattgaaattattcgacatgaatggtcggcacatacacatatatatgtatatgtgtgtatatagatatattttgtttttagtatcatcaccttatattattattgctttttttccttttatattcaagaaaaaatactggtgattttttttattatttaggtgtcacaaaatcatctactaaattattttgaaagaatatagagtataaatattttattttgtttattaaatattaaattctttactttttttcctttaaatcatattcaaatgtgataacctttcttttataattatactaaagtaaaaggtttgtctgagtattgtcattttcttttttcaaatagattattaataacaaaagcaactttccaaattttaatatgagacataaattgaatgaaaagtttagaagactatttaaaaaagaaaaaaaaccatattttcctgcaccatgttcggaatatgattcttctgccacagttactctatcttcatatgagacatgttccaacaattctataattaaaattaggaaaagagatcatttgaaaaataaattaaaacatctaaagaaaaaagataaaaacaagtcacaattaagcattagataatcaaataaggaattccttttaataattttttttacaaaatcatttgattattcagtttttatcaatattctcttatttaaattgtgtagtatgtaaggtggctgctgatgtttactttttttattatagtacattgtcagaggaaagtgggaaaacacgtagaaagttgtattttagataaaacaaaaagttttatcattgcttatttgtaactgctttacaaaaaaaaaaaaagaaaagaatgaatttagtgataactgtatattcattcatatccttacttccttaatatcttatgtaagtatatgatatttatgtgtgtatgtgtttaaacatcatttaatcaataatgttttcccctaagtagtttcattatatcagcttatttaatttttgtctctcatatttttttataagtaacttcactaaagtatatatgtatattaaaaatagagttttcaattggcataaatttctactataaaatatgcctccgtggtatgaattattgaggtatccattttttcatttctggtttctgtgataaaaattctttcaatttttccgctaaagttattgcttcctccttcatttgttcagaagttctttctactctttgttcatcaggttttaacattttaccttcattaacaatctccttttcttcttcaacagacatttttgcattattcatagtattttgtctttctaattcctttcttttaattcttcctccagcagttctataattatcacgtctttgctcccatgtccaaatatccatatgttcatatactttatctccaatattatttaattgaaaacgaggaataatgtgagtgtgtaaatgaggaacactttgtcctgcttctgggccatcctgaatagcaatatttattgaatcagcattgtagtaccatcgaataaactgttgaatcaattgtactgtgttaaaataatcgtgggtttctattggagtcagttgcgataattctctaatatcagtacgtaacggaactactaaaacatgacctgggataataggttttaaattaaccaaagcgtaacaatatgcagttttgtaaaacacttgttcagtgactaaaaatttactgaaatatatttggcttgccatcgtctttaataaaaaatgtataatttatattaatacatcttaatcacgagagtgaaacccagataattcttcgtaactttccaatttaaacaaacaactttaccatccaagttcataaagtatttaaatgttttttttactttttagtagtcgtaacaccaaagttctcaatctcgatgtctcccgtcttccacctccctatatgttgtgtattttttctttctttctttttttttttccttcagaaataatctttagcaatgttacctaccacttgttcgagtttgatatttttaatctaatgctattactcctgtcatctcttttgcttctctctattcgaataattacgagtatcgcaagtgatatatttataataaactagtttaatctaaaaaaatataagataccatggtaatattataaatatgtatgaataacaactacacaatgatatgtaggactagtatatcgaatatagacttccaccttgatcttcaatagcggtgattaaatcttcaacatcatcacttttcatatcccatcctaatttttctgaaatggatagagatcttaaatttggtaacctatcttctaaaattgcaatagtgaagtcatcagggtgaattttggaagccattcccaatcttccacttgattgtaggatcaacgtccttaatggtcgttgaaaattttctaatttaattaacatgtattcagaaaaggtccatctggtacaatagtcaaccattaattgaatggtgatcaaatttgggcaatatcgaaagataaaatccaatgaattgtcccgcaacgagggcatggggtaatagaataataaccgttttaagttatttccaatcttatcaaggataacatacaccgattgttcgtctaatttgggacaatcagagaattctaaagttataatggtagtaggccaactagtagttctaacaaactcattagtcaatccaccacttaattttaaatattgtaaattcatgggccactgaaatccttcttcacatccatcgcaatctatagaacttctagggaatgataaatgggttaatgatttaaaattcttaattgcagcaaatagctcctttagtttaactgtctctgagactaaacctaaatctaaatattttagattatggcacgattttaatgatatcaatggtgaatagccaaaacttgtttgtggtgctgtaaatttaactaaatttttggaacatcgtcgtaataatttagacacatatgaatttttaccactttgtaagatagtagatagatccaattcaaagactaaatcaccgtttttccttttcttgtcaactatcaagcaatcaacgaatttatggaaattgtatgatgttagcttaggagaaaaatagagaagaggcaaagaataattataccactgatgacatacaaggcaaaattccttcggtacaacacctcttgtattttttctgttagaattcgattctgttgatgaatattcctctgtatttggaagagaggatgcatattcaataataagtttttgtaattcccaaggcagtttcatgtcttgaccatcatggtagtaattagtgactaatgcagtctttggaaaatctagagagttgggtgtgtcatttaaatttaatttgcggatagatgaaacaacagaaaaagaggattcctgtgatagagatactttataaaatccttcacctgctacatatttcctataaggagctttcactttctttggtcttgtcttgtttgccatatggggatgatagtaaatggattaaatatagagaagttgaaaaagaagtatataactgggtagacaacatatatgtgaatataaatattaagtatgcgtatacttaatctcaaatgtgatcgcaggcttatcactgaatctcctttacttgaagaaaaagcaagaaaagtaaaagaaaaattaaaaatataacaaacacaaacagcaattaaactgaagctgtacgtatggctagtataatagctatcttcaaagtaaacctttttcagacgtttctaatagttgtgcagtagttctaacccacttttacaattataattttaaagatgtttgtgtgtgacttctcgtggaaattaactatattgtaactgcaatatcctgtgatacgaaatatgagtttagtgaatttttccaatttactttattaagttttttttttttttgcaacgtattgttgtctaaggagaatttgtatatgacgttatgaatctgtgagatatagtagtatattgaaaaactaccgttagatggactagaaagtgttgtagatagatgagcaagaaataaaatatgcacctgtcttttcatatactgactatttattccagccattgctgtttttgtgttttttaaatcttatagctcaatttttctatttttttttttttagaactcttcagcctttacaattgtacttaaaaccatggttattatactatcgataaggtctcaagtgacgatgtgttgaggttctaaccattagtttaaggaaattatggttattactgtttttctgaactctctatttcaaaagatcttataaacaaaccttaatagttctaacatgaagaaatttatgagaaatgaataaaaatatatgaaacatgagtaatggacaagaaaaataactaagagagttgaatataggatatatatattgcttacctaagatcaattctattagtttaattactttttaatattaagcttaaagatatagactaggtctgtttttcatacttatctaaatggatgagcattaatgttgtgatagatgctatcctgttgtcactataggtgatcttgcacagtcaatattgatatttttgtttttcttgttcataaacgtttatatatttgtaatatcagcgtattttattttatctctcgtatacaatatgatctatatattctacagataggaaaataaccatgaattacctatcatgtcttgtattctagaagagtgtgtttcttgtaataagccttcatttaacataaatatattgttatctgtcaactgctaaagtctcatggccatattgtaatatctctagtattactgttttagggttttgtttagaaaaatgagggttgacgatatttttctaaactttcctttttgtaaaattttacaaacatacataaaaacaggagtaactaacataagtacaagagagcaactaagaagaagaagaacgaaggaaccaaggattacctaggtttagatatatagtatataagcctgtactattaatttatcttagattagggatatagatatatagatatataggaatcttatatctagagatatagaaagagtctatatcttatatctatccaagcgaaagattattgaggtttcaacaagattaactattgtcagagacacatcgccataggctatcacatatattgataaaaaactagggaacatttatccctctcagcattccaagaagagtctaccccttgtgttttcatccatcagaacaagtgtaaaaaagaaccttgttctaactgaggttcgaactcaggacctttgccgtgtgaaggcaacgtgatagccactacactattagaactcaacctataaatatgtgttgtattatggggtggtgaaattctttgtgtattccagggaagcgcaaataatattaatagtcattcaagtaatcgagacagtaatcaattataggcgataatataattactaaaacggtcttatatattgagcagcttatatcgagctaatatatttattcaaagttacttaacttgttacttgcttgttgttctatttttgttcatctataatatataaattatttacaagaaacggttatggaaaatgatcttttatctccagaaaacgttatccttttatatgttttctggagctcgatcgattattcagattaggacattaatgacttgactgattcaccctaaaatttattacattaatttaggtgcactagtggattagaactgcaccccaattctctaatcatggtgattagtaatacacgtgggacttattaaaacaataggtaaattctagatttgccaaaatcttatgtaatccaatctctttattatgcagcatctaatgttgtagcacgtgtatggcttattaaaacaataaatagttctagattcattcagaatcttatgtaatcttgttggtgatgactcctctattatacaacaatatgtaccttaaaacaagatgtataactatcaaaattaagtaagttctctgaatgggtacaagacattatagtgttttcaaactagtatcatacattatttgatactaaaaatacaaattgttaggatagaaataattcttattacgtaataaacagtattttaagtaggaagtaattttacaatcatataaatgatgaaaaattagataatatatcgagaaggtcagacatgaaccttaatttgtctttagaaattatctctttgtctatattttagaaattggttatgtcgtgaaccagaattaatgaatagtacaaaagatgattcataaaagtaaatattggtaaggttatgaatttgtagtaggtttaattcagtgacgctttttctgagatgttattgtctgttaataagggaggtgcatacttttgaaaaaaatagtaatcctatactgacatcaagacttgtaaccgcatattacaaactgttattaaacataaggtaatattttaaagtctgcctttttgggtgttaatgcatcatgtagtaagacactacgaaatatacgaaaaagaacatgtaaaagaaactagagggtggatgttgatcatctttgtgtaaatacaaataaaagacagaatgacgtatttttttatatggattactaaaagtctcagaacagttatttaacaatattggaacacattcttatatattatattgaactttgaactttcatggatattcgaaaaaaaaatctaaatgaaaaatgaaaaataacttattcctcaaaaaacagaatctgtaaccgttacatctctcaactggtattttgtttttaccattttctaagtttcattctactttaacttcatatgttttaagttgctattaccctcagaaaatagaacttaaaactacacctacaaaacacattacatatctatttaatttttgaaaagttctgtgtaaattaataaagattaatcaattataacatcctttatagacattgtcatgtctacaagattatatatatatccataactatgataaacaagaacttttttatttttttcaatttgctaacctacttaataagtcttgaatattacttgttatagtattctcagttgtctcttgatcatcctcttgaacttcttcaattatgtattctttttcattatcttcgtcagaagctttatttttcttttttgatggttcatctgaatcactaatacttgaaccttcctctaaaacccgcttgcttccctcaattgtaatatcgatttgtgtatcattattattaattacattgaattcttcattttgtttcttcttataagtaccattatttctatcgctattattatcattgtcgctattattatcactatcactatcactatcactatcatttttaccgtaagttggaaggacatcattattgccattctctaaagaaccatcattattttttattctttttggatcctttgattctaatgcaaattcgatctcatttaataatacgcgattttgttccaattttttttcttcttcacttaataaagaatgtaagtatttgattaattcttctctattccccattgattcctttatcgtatcctgagtaactttagcaatctttgtcacagtattgaaattcccttcatacacaatactatttggatctaaatcgttaattgcattatcgaacctggattttaaagcaggtatattatgtttatttttctttaatttttgatataattcaattatgggttgtacattaggtgggatagatagatttttaccactgtttatggagattgtgtcggaatttttgggtacaatatctttcaatttactttctatttgccctaaatatgatttatcaaacacttttctttgtttccaaatattgatgactcttttcaacttcccttgcaagtcacttggaaattgtgaataaactataggtaaggtctgtaacaagatcttagaaaaagactcttggaattgtttgatcccttgactttttccctgttgcaccacatgattaactaaataaacagctaagagacggtttctatcagatagatctctttgagttatatatctttgccatgtggttgcaatagaatctgaatctctatattgtgataatagccatttagatgaggaagatatagattcttgtgtatcctgtagttgttttagttttgaaataaattggtcagatgaaaaggacattgttatgcgtaatagtttatataaatgctgtttattcctgtttgtttagcagtcttctttaataacgatgccaaagatagactatatttttttccttagcacacgtacgtcaatccgacttagttagttcatcccttcaatcttctttatttatttacttgtttgtttgtttatctattcaattaattgttcttaaacagattttttgaaattttggttttcagttctttttgttttctcaaattgagaaagaggaagaggaaatgtgggcaaagcaatttagaggttgttgttgaagtcggttataatgagtgggtaaaggggaaattgtaggctctacaatgtctattaccagtatgttataatctcatggatctattcgttgtatctctttttgttattgtttggcattaatttgaacgtatcttgcttgatagagtagaaaaatgaaatatgtgatctgttttgttgaaaaacgatatataaatggatatgccaagtcataataattgtaataataatatctaccgtaagaaaagaataaaattggatagtgattcgtgtgagacttttgatgaagtttctaaattaagagaacttttctttagagtcaacactatttacacatttttaatgtgtcgcaaacatgttatacctacgtttgatactatagtaagacctgtacaaaatgctttaaaaagagaagtttcaaagttagatctagctaagattgtagctattcttcctagagattgtgaatttaaatatattgacgaaaaccaaattcaaaccgatacaaagatgtttgattttaaacgtggtggttatcaacaaaatgaaagtgatatatttcaattaaaagactgttcaaatggaacagattcagttaaagctactcagttattaatttttgaatttattgatgggaacatgaaacgttcctggtcatctgatataaataataacttgaatagagataatagtatcaatttagcttttagcaaagagaaccagattcatttacccacctatacattagacgaaatgcgaaagatgattcgaaagaggtcggcaaaattcaacgattctttacaaaaatttattgataaacagaagaaattacatttaaatccagaatctgaattaaataaattggctgaaaaatatttaccaaaagaaccaaagtatgttgatccaattgaagctatgattaattcaaaggactccaaagataaaataaaagatgataatagtgttttagttgatgaaatatcaggactaagaagacctttaataaaaaatgtaataagtagtttaaagaatatggacacttataacaatcaaataaagaaacattttgttatatcctccaaaaatgcagaatttggagaattatcatttcaattagcatcagaaatcttccaggctttaccatatgacaaattctattctcatcaagctgatgcattaaattcaattcataggggagaaaatgttataatcacaacatcaacttcatcggggaaatcattaatctatcaattatctgccatagattttttactgaaagatccagaatccacgtttatgtatatttttcccacaaaggcattggcacaagatcaaaaaagatcttttgaggcaattatatctaaaataccacaattggctgacactcaaattgacacatatgatggtgatacagaacaaaatatgagaagagagattagacaaaaagcaagggtgattttcacgaatccagatatgattcatactagtattttaccaaaccatatcaattggaaacatttcttatataatttgaagattgtggtaatagatgaactacatatttatcgtggcttatttggatcgaacgtagcattggttatgagacgattattaagaatctgtgagctttattatcacaataaagatttaaggtttatttcatgttctgcaacattaaaagatcccatcaaacatatgcaagatatctttggaattgcacaagtgaaactgatccacgaagatgggtcaccaagaggtcctaagaatcttgttatatggaacccacctatcttaactcaacatctcaggaagagagaaaatttcatcaaagaaagtgcaataattttagttcaattgataactcaaaatgttagaactattgcattttgttctgttcgtcgagtttgtgaattattgatgaaagaagtaagaaccaggttagaagagttaaatagaagtgacttaattacagatgttatggcatatagaggtggatattctccaagtgatagacgtaaaatcgaaagagaaatgtttcatggaaatttaaaagcagttatttctacaaacgcattagaattgggtattgatattggtggactggatgctgtattaatgtgtggattcccaatatcactagcaaatttttatcaacaaagtgggagagctggaagaagaaataacgattctttgacgttagtagtagcaagtgattcgccggttgatcaacattatgtggcacatcctgaagttttattagattttgataacagtgattcttatcaagaccttgttcttgattttagcaatcctttagtccttgaaggacatcttcaatgtgcagctttcgaattgcctattattatagaaagggatagaaagtactttgatgaagagtcattaacaaaaatttgcaatgagaagttatttaaaaatgatgaaggatatcatgctagtaatagcttccttccatggccttcaaagaatatttccttaagaggtggaaatgaagatatgtttgctgttatagatataactaataacagaaatattgtaatagaagaggttgaaacaaaaagaacaagtttcacactatatgatggtggtatttttattcatcaaggttatccatatttagtaaaagaacttaatcctgacgaaaaatatgcgaaagttcaaagggttaatgttgattggattactcaacagagagattttactgatgttgatccacaattagtagaagtaataaggcctttgagaaatagtgatactccggtttattttggtaaaataaaaacgacaattactgtatttgggttttttaaagtagataaatataaaaggattattgacgcaatagaaacatataatgatccaattattttttattcaaaaggattgtggatagatatacctaccagagctttagaactttgtaaaaataaggaattaaatttggcaggtgcaattcatgctgtacaacatggtattatggggatatttcctcggtttatagtggcaggtgtagatgaaattgtaactgaatgtaaagctcctgaaaaagagtttgcacaaagacaaacgcgtagaatacggccaggtagaatcatattttatgattcaaaaggtggagagtatggatcaggactatctattaaagtgttcgaaaacattaatgaaattttggaggcaactctaaggaggatagaggaatgtccatgttcagatggctgtcctgattgtgttgcaggtacatattgtactgaaaattgtcttgtcctgtctaaaccaggttctttgattctcctccattcaattttaggtcataaagaggaagattttcttgataaaattaaaaatggtccggaacctaatatgcctgagattaaagtagaaactatagagccagtacgtgatcatgtcaaattctcgccatcatttaaaattattggtattgaagaagattagtaaataaatttatttatagaataatatgttttggttagggttttatattgtatagatataaatatcatttatcatatatatatatattatatttgtggtaataaagagaagaattaaacttcatcattactctatcaagacattagagtgtttactgcccagctgacacttaatgctcttaaatctgtgtatgtttggccaactcctacaaaaagaattgggattcctgttgcatataccatattaactatcgtacctaacatctccccaaccgtatcacattttgaaataataaagaaatccaaatttctggctttgccaaacgcagcattgaaatttttagcttgctgtactgaatctgtaccaactaatgcttcacctaccataattattttgtctggtttggcttgttctgcaaacgcctttaatggagacatcaaagttgcatcattatgtcttctaccagcagtatccattaagactatatcaaaatcttgatcgcgtgcatattttatagcttgtttagcaatctttgtaactaaatctgtaccaccatacccagcttcaaataattctacataatcattacctgatttgccccttctattcttggagcctcttacatgtgaatcatttattagttgagccaagttttccacatgtactcttaattgctcaacagcacctgatctaaaagtatcacatgctacaattaacacacgaagattgttttgtaacaaccaaaaggctaatttggacaagtttgtagatttcccaacaccattgacaccaacaatagaaaatacgtatggttgttttttaccatcgctatcagttttgctcagtttcttttgtatatcatgtagtaaatcaacagatacaccaggagttagaatctttgttaatgttcttgacaatgagtctctagcagtattttcaacagaggtccaatttgctgttttggatccgattaagtctctacttacttgctctgtcagatagtcagctacttcaggtgccacattctttgagactaatttttgccttaatttatccagaacagatagtaaatcctctttagtgattgttttattacccaaaaattttctttgtaaaaatccaaaagctttttctgtgtatttatttcccggtttattggcattattagaatgtgtttccttctgtgaagataataaatcatctatttctttaattaaaaactcaccgtttgctgttctattaccaaatgtatccttatcaatatctattatttctttttgttgagcttcgtcattttgtacagtaacattactagatttattggtttcagaaaaatctaatgcactaggatcataaacagaagtgtcttcaatcacaccatctcgaccccattttctacctccagatgttggtgtctgctgttgttgttttttattctttgtggtattattatgggcattattagatttgttagcatcattgaaagttgaactgtttacaatatatttaacagattcttcatatttagtccttaaatatttatcaaatttgtcaatcacatcctctatatcgtatagaatatctctttgatttttaatattttcaaagatatgatatggaatatctaaagattcccataatgccaaggctaaatttaaagtatcttcagcttcttgatttaaatgtaaactttgttcagcatatgttataacaaaatacagatcaggttgtttgctaacatagaacatagtacaaaatgatcgactattggatttattaccataactggaattcttagtagtattaggattttctacaacaacatttaaaacactatatttcccatttatggtatctttgtttgttaccggagagataattaatgcatttaagaaggcattaatttgtgttgcagcaaactttttaccagaacagttgaattcgtatactacttgaccttggggagtgaagatggctaactgctcaaacattatcttcttaatagtttttaaataatttagtagatgctttgctgagagattggtattctgttttggatgtagttatctagacaaatctcctctctctagcttaccaaactctttaactttttgcttctatatctttttaacgtttttcatttttagatcagaaagattcgaagtttctcaaagatgaaagaaaattaaaaaaatatatatatagttatacacacaagttcaaatgaactagaagaaataacaatgacactaatgcaaaaggaagtatagtatacaacgcagagaaatgttagagatacggtgctaaatagtaatgtttacacaactaaatacagagagtgtgttacgttacttatatagatgtgtgtatatagggatcacgtgtagttgaattttactaactgaaggtttatttggggtttaaaatctttctgtaaaagcattcctagtccagtctaataatttgtcatagacaatgacatttgcattatggtatttgattgcatgatcagaatcaggaaatatgtgtacatcatagttttctatgttagcttgatttagttggtctaaaaatactaaagagtgttggaaatgaacattatcatctccagttccatgcattaataagaaccgtttagcttgtccgatagaagttacattaaacacgcgagactttttgtacccatcaagattctcctgtggggtatacatgtaacgttctgtgtatacagaatcgtaaaatctccaatctgtgacaggggcaacagagagtccatatttaaatgttttccctgcatccttctctagagtcttcaatgtcaggtatccaccatatgaccagccaaatattgctatcttatcagagtttacatactccctcttggaataaagagtggctgcatttatttgatcaatggcttcgtattcacctaaatttccacgtactaatgatctgaactgaatacctttacaaccagttccacgaccatctacaatgactacaatagcattcaactgagatgaaataacttcactaaagccaatagaaaatttttgaatgacttgttgggaattgggaccaccatatggatagaagaatacagggtaatagttttttaaggttttgttgaatccatcagggaggacttcaatagcattgactaagatatcattgcctttgttatctttacccagatttagctccttgtaagttttcttcggtatactgaaagattttagtctattctttaatatttcatttttctccaaataatagactgtcttaccaattttatttcctatcactttatcatcagatttatcaacattcactctgataattttttggaatgggatctccggaccttcatatgttaaaagtgcatactcacagttcgacgaaaatgtaatatcgtaaactccaggtttagatgtatctgttacttcatagatttgatttggtttttttaaagaaacatagtatatatgtctttctgtggatgattttttggtggcttggaaatatattctttctaatctattatcaaaagctatgggaccagagataacctcccaatgaccgcttgtcaaaataataggagttgttgctataagagatgaaaaatatactaaatgattataaccattgacaggcattaaatctacataaccattatgcgttctccccttttttagatcttttgggatgtgcatagttttacgagtgatttcccaccaactttcattagaagattctgatctcactactttggtttcttgagtcctcaaatcaataaaaacaacattcaaatcattagaagaacggtcagtaacttttgcaatcaagttattattacccatccactttacttctgtgattaggatagaatcatgaaacttgccatgattaacgaaacttctatatatagaatcattctcagtatcataaaccagtaattctacttttggatttggggtaccgctctttggatatctaatacttttcatctctgggtattgacctaccttgttgtgaacaaaatatggtataatatattcttctacctctgtttcatcaatttttaaaaaggcaagatatttaccgtttggtgaccaccatagtgttctgtcagtttcgaagatctcttcttcataaacccagtctggcctaccattaaatatctggtgatttccatcatttgtaatctgagtaatggtttgtttcgttttagtggaatacaaatagatattgttgtcttgtacgtaagccaactcaatagaatttggtgaccattgagtcaatgcaattgaatctccaatatgttggattgaaaaatcttcttcaatgaaaacaaaatatgttgaaaagctcgaatgtctccaattctgaatacaatttgttttaattaacagtttacttaagtctggggaagctgttattgtctctacagtaaaattacggtttccatatgttatattttgaccctcaaaaagaatcctggaataactggcatcaataaccgatcttatttgatatgtattatttatagatgtaaagtataatcctttatcattatttgtatcttccaaagcattgttccttaaccactgtaaagtgtgaatttgaggtacaaaactttcgtttctagtataattaaatgaaacttttaataatccctcttcagtcatatatgggtcaggtaatctaaaagtatcattggagtggtatacgtcagtgtccttaggggtagtaagttttgctggaaccaatttaattaaaacaacaaatccccaaacaattaataaacccaaaacccccaatttaataagtctatcaagtaagtgtattctgtatgtcttgaggtgcctctctggtatgcgttcaatgtcttcatcattttcctcagttgtagttgacattataggtctttcagtaagagggtctcttccagtgtttgcttctggtgtaattaatctatcaacctctgtaggttccattatttttttcagtaacaatgaattcttatttagtctaagttgcttctgaggtggtttttagtatagtggtctgagtcaaatccatcaaatagcctctctctttagaatcatatcatttaggaaaagacggtccacatgtctcctatcagtgaattcaaggaagggtgggtcttttttgtatttttccttctttattggtattgacgtttgataacaacattaaaaattgcttgatatattatgtttgtgcgttaattagaatatgattaatcccttcatataggtagatatttgtggttgcaattagttggcaagggatttgatatatatatgtatgtatgtattaaaatttatatattatgtatttttacatttcgttctataactgaatttgaccttcaatgacggttaccgaatctccaccaatatgataagagacagaggaattgtcatgaacttgtatagttccataaattgtgccatttctctctaatctaccaccttgggtgatcttgatattagtagtctttttaatatcttctatatctttcaaatatctaataaatgataatgcaccactaccacagactggatcttcgtcgacattgataactggtgcaaatgctctcatttcatattcattaattgttccagctcttttaccaccaaggataataccaacatggttattaattttagatatctggctaattttagcatagtcagggttagcgttataacatgtttgagcattatccactaaaattactacccagtgtggaccaacatccaacaattttggtgattgaatagcagtaacacccaaagcctggcaataatcattggcaattgatgtatcaatactttccactgaagtctttgcagcttcaaaggagatcaatccgtcttcaatagacaaagttacgactcctacaccacactcttgataaacaacattttttttgcctatattgttagtgaactctaaaaatgctttacatgatccaacggttggatgtccggcaaatggtaattcgttctttggagtgaaaattctcaatttataatcgtatttgtcacttgaaggtttgaatataaatgtagtttctgataaattggtccaattggccactgattgtaactgttctttggtcacttgtgattcttcgatatttaagcaattgattactgccactgggttccccttaaagccttgactggtaaatacgtcaacttgtttgaatggtaattgtaatgtcattatgatggtgcagtctgccttatgttctagtttttgcttaatgatgttaatatccaaattatagctgattatgtactaattgatttgaaaggcagtagcaaggagaagtaaatagtcttttttaggtatgtataagtgagtttgtttctttattaaaactcttttttgcgaactgtatctcaaattgtcagtaaaatctggaaaatcaaatcaacttggacaacatgggagaaaaaataatgtatgtatatataataggttcctaatgcattttagcatgatgactcattcaacaagagatgaaagtttcaaattgtaaaatagagaacagagaagatggagaagtatcaactcggtctctaattaggatgcataaaataaaaaaaatacttacatattttgtattataatactatgtgaagataatacagtatgttttaataataataatatttatgtactaatctggtgtgattataagtaatgtctatccaggccaaattccaattctttctctaaatcaaacagttcatcagtagcaacatttgtattattattcatgtcactacgaggttccatggccataggagaagccaatgggttttcttgaggtcttggtggatagtctgttctgttcattgtaggtaagttttcgggatctataccaaatgcttgtaaagattcgtttatcgattgcctccttttgttttcctcgttttctatcaaaggttcctcttcttctctatactgttgttcctgtacctgtatctgttgttgttcctgttgtaactgttcttcttctaaaagtggctgtcttacaaatcttctaaaatcatgtacttcatctataaccatctgtctcaaatggtccatatcattaacagcctcaaaactgaattcgaactttccactacaaacgggttcgtcagcaggatcatgccatatagctaaataaggatgggctaacgcttcatccacagttattctttctcttggatcaaaagccaacattttttccaataagtccaaagcttgtggatttgcatttggatataggtcgataaatggaaccttaggaataaaacctaattgatgaatatagttttgtacatttttagacccgatgctccttaacgtttcatctggtggcgtgcctaggacctgtagtattcgatttaattgatctacatagtcttttcccttaaatattggtttgccacctaaaaattcggcaagaatgcaaccagtagaccatacatcaatggcttttgtgtaaccttgataacttagcatgatttctggggcacggtaccatcttgtggctacatattcggttagaaattggttgttttccattggattctctgaatatcctctggctaaaccaaaatcacagattttcagctggcaatctgcattaactaatagattaccaggctttagatcacgatgcaaaacatctgccgaatgtatatatttcaacccacacagaatttggtaggtaaagctttgataatgggcatcagttagaggttggtttgacttaatgatttgatgcatatcacactccattaattcttcgtatagataaagtccattaaatgtaccatcacggtaaaaaactatgtctgtgtcatatagacaggtaatattcttatgacctctaaaatgtcttaataatttcaattcacgtaaggatcttttgcagagtagtgttttagaaaacacatttgtaacttttttaatagccacagtagtgtcttcgactgcttctgtaaacctagcagaacagactatcccataggcaccatgaccgatttctttaatcaactgaaatcttctatctactgtaaagtcttggttaaatactttaaaagtgtgtctctccacttgttcttccatactttctagcttactactggacagttgtgaatgaagatgtatataatgttatttgtattctatgactgtttaatgtactattaaagtgcagatttccctcagtataatatattaatatatatcaacttacactgagtttctttcgaaaaaaaaaaagagaaagaagaaggagaagaagattgaatagggaacagagattgcccagttaatcttatcaggttatgcttaaaactatagaaggctccttctcacctttaaataatggatacacttgtacttgcagtggttatgttggtgaataaccataagagatggattcaaatatcttgtatcagataagagaggaaagagagaggaaagagagctggacaacactacgctaacgttgatgccctgagatcaactattaaaacagatgggaactacacaaataccatattaaagtgtttctataaatagaaatcagctcttttggaaaatgttaccactttttattcctttttttcttttgtacgttcatcttttgtccgctttcttttttatttattttttttatttatttattttttgtctgcgtgtccgttctttttttgcaatcctttgttagggttttcgttagggttgttgatttctttttgggatttgttggcctgttagaagagagagatagaagagaatcttgtttgggttacatttgataacaaactcactttggtctctttcttaccttatctgttggctatgcttgaaaaaatataactagatattagttgagtagagtgtatttccaaatattttgttgaatattgtcccttttacatcgaattatgtacccaaaagggtacatagaaatatcaaatgcatattatttgatattacttacgataaaaatatatcaatttttaaatatatatatatatatatatgtgtgtgtgtgtgtgtgtgtgtgtgtgtgctcttgatttttttagaactgtgttacagtttctaagcccttataaaattttttgactttatcattcgatcgaattttacgtggattgaaatttttaacttgtaagcattcctttgacactgctctagataatgcaacatacacttgaccagcttcaaaaatgttttttaaatcaacttttaacctcggaatagtttggccttgtgctttatgaatcgataatgcccaacacaacatgataggtaactgtgttctctgtaatgcagtagcttcacctggcaaatctaccggaaaaggctctggaagtaccaattcatgataaaatttccccttgcctatagaccatctaacaaatgggtatgctggttctttagcagactcattcatagcgtaatttaccatttcttccaattttccatggtgataaaagtcacgggctttcaattctgccatgaattcaggtacttccttgaatcttttattgtgaatagccttacttacaagcctcatatcttcaattgtagtacgatcaatagtatggaacatctctaaaaatttcgtggctaatctttgtgtagtgaaaaataaaacttttcctaaagtaccattgaatacctcaacgtcaggtttgttctttaacatcattacttgagcatcttcttttaacaccaaagtcttttctgccatcacagcagaatctaataactctaatttcattcttggtgcaagatcttcagcatggaaagtatgtggatcaccaggtaaattttccaattgacgtttattagataaatcaacttctcttcttgttgcatagatttcagtgggtaaaatcccatcttcatattttacctctctttctaattttttaatactagcaatcattttttgttcaatctctccaaaacgtatgcaatttaatatatcgatcaattcattatcttgttgtctaaacacttttgtcaataatattgtcttttgtatacattttttccatgcttcactctcaaaacaaaataaagcttcagcttctccatttgaatttccctttgttgaatcactggaagttattgatttagacacaggtggtaattgaaaaaaatcacctgtaaatactagttgaattccaccgaatggtttatcattctttcttactacacgagcaatatattccaatttacttaaaaattttccatcaatcatagagatttcatcaattattaatacttttgtatttctccatgtcattgtagcgtctcttcttttacttatagctctagcaagtacctctgctgatctattcccaataccagtgtgcgaccacttgtgtaatgtaataccaccgatagttgcggcagcaagtccagtagacgccgtgattgccacagcttctttcccatagattcgttgcagattgtgtataatattatttaaaataattgatttaccagtacctgcagatcctgtataaaatatattttggcgtttttgtaccactaaatctatcacatattgttgttctttagtcaatttcaaaattattgaattatttttatttgattgttgtttattattactttgtatagcacgggggttgctgttagacaatggttttaatcttttaacagtgtttaaattgaggccttgtaatgaacgagttctcttcgaactattcaattgattaggatggtgtgatgacccaaaggtgggaaaagaggaggaagaagaagaagataaagtagaaaattcagatgatagttcgggtgcctgggacagcgagaaataatcacttttagtaggagattcaagttgggtgctgcttgtgaatattaacttgtgagagggtgtagcattacttgttgtttctctaaaggtttcacttgaaatctcagtaattacatgttctattttagttggtgaagcagatccaagatcagataccgaggaattacttctttggaaatttgggacccttgaaaatgatgttatatttggacttttgaaattctttaatttaggaccattcatcaattttcttaactcctcgttggggtcatactcatcaaaggagccctggctttgaaacaatgaagtagtcgaagttctagataattgaggtctcgaaccttcaattatgatgggttgagattggcatgatccttcagtcaaattcgaaagggatttttttgaattaaagaatgaattggtagatacactatttgatttcttctgtacagattgatttgtaattgtattatgggtttttgtaatactatgacttctcttggtctgggagaaaaatgatgcaatagatctttgttttaagacaggtttccccgaattctttgtgtattgacccactttacttctattcattgatcaaaactgtttcaatgctgttataaatatagacacgctatcccagttacatacatatggtagttaataaagaaagtaactaatggtttggggatatatatacttgtttgatctgctctggtctgtcatatttccagtcacgtaaaaagcacatgttacttttcttttgcaaaaataaaaataaaatgtaaataaagaaacaaacaaaaatcgcgaaaattcgatgccctccgcttattatttgattcaaagtcgtatcataaccaaactagttaagtaaagaagaatcagaattctgtatatggagtcaaaaaatggtaaaaaagaataatctttgtttaattcactatattgtatatatataacaaaggaaattaccatatcaactaataattacagaaataactaaaaagaatagataatattaagcagattgacactaattggggtcctagcttatcttcataatcgatagccttcttctgtctaatattgactactctggaggcatatacaatagtagaacgaataatgactactagagcagtaataaagaatccaattgaggcaatcattgttgttggagatccatatgtaactaaggtggttgatacactaccaagtaaaatagcaatagacatccaagataagaaagttctttctgtagcgaaatatacttttggttccacacggactggaacacagatagtctttccatcaggagctttcacctcagtatcgaaaacagtacctttgggtactttgaaaacttgatccccattgaaataatgatctatagatctcataatctgataatatttcttacttaatgtattagatgcactccgtatctttctctcgtaatatgcggcgttaacacttcttgaatttggatctaattgtgaagtctcatctctagttatggatccatatccaccttcttctatatctagtgaatttcccggagcatccatcattgcagcgattaacgcatcatcggattcatcatcgttaatatcacttccatcttcttgttcttcgtcttctgcttcatcttcgttatcctcttctcttacaggtctagtgatgtcaatctgagtttgaatagggggttttctgatgtctacatccatctgtggtagccaaaatgggatagaatccaccttatcatacaacagagtagcgacaccatgaataaatttggagaattttggaactggttctactaaatgagatcctactaattctcttacccattctggtggctcttgacctaattgcgtttgtaatttgacttctaagacagcatatggaaatctacaaatatctttagctggtagctgtttaaatggccagtcaattccaatatctgttcttctccaattaccatgtgttctatctataccatcaaaattatcttccctgatcagagttaattcagtgtctaatgatatacgtactcttgcatcaccaggcaattggaaggctgttctattgtaaaaggatctaaccacaggccgtaattttttcttcaacataacatattgaacttcagttgctaaggcttctaaactttcaatctcttgaatggattttttaccctctttacgcattttactaaaaacttgttcaacagtatatttccctttcaagaaatcgtttacatagcgttcctttaatggaaatctagctttaacggatttttcacctgtccaatcttctctatgagtctttctttcaacaaagattgtgtcagtctccataccaccataccatcttaatctatgagcttcagcgccttcatcctttcttatccgaccataataaaggtccaaatcttcattatcatagtaaatggatgagattgcagaatcttctttttcgaattctttgtttgtattgaacactaagacaggtaaatgtttcaaaataattaatttcaattcagttatgttgtctggatgaacccaatatttggtagtctgcctaacgaaattttgctgtttcccgcctgctgcagaatcacctttaactgggcggccactagttctaacaatatcatataactgtgaaatcttgactactaattcgtcatagttttctttaaagaagggttttgaatctaatctaacttgaaagataggttttaagataaaccctgtttttttgtcatgctttttgataatcttttggaacccagtatagtttagtctggaaaacttagctaaatcatggacatcagcaataatgtcacttaactcttcttccaaaatttcaaaatcgagttcagtcggtggattatttgaatctagtcgagatacagtacgttgtacctcttgttggacgtctttcacacgacgtgtgacttcactgtttttaactttacaaaaggagtaaactttatctaattcgatctctaaattttctaggaaggtagtctctaaatcttggttccactgatcgttatttttatgcaaattatcttctagatcattttttagatcgtcataagcaatatagtagtaactatattgtctgattaaagatttacttaagtgttcaccaaacttcatactttgagcatgtattaaacgtggctaagtagaatctgtaataagtcaactcgaacaatcaaataaataggcacacagaaaagagcttatcaggtttaaaagatacttcgttgtggtgtgcacaatctttttttagagtaacaaatttggttttattttagaaactctgtaaaataataaatatacaacactctagttgtgtgtctaattgtatttctaccttatccttaatcactcaagtatacactccatatatttttatacgtttgaatgtgctatctttttttttttgttttttcctccttcaaaatcactgtttgtaaaatgaaatgagaaggagaaagagggaaagaaagaaatgtgggggggggattgcagaccatttaaaggattgataaggaaaaaaaaaaaggtagggcccagttctttcaaacagagaggtgactttgcatagtctgttgtcatagttttaaatttttattcacgtttatgtacatatgcgtatgtgtttgtgtttatggatgtgcgtgtatgtatatatctttatttgtttctatatgtttacatacgaagcaactaattcaatcatttcattaatttgatcttctgtgaaccttgagtcacattcttctacgattgaaaataagtgaaccatattggtaggtaactgattcactatttgtaacttctcaatcttgtaaagttcaaaattgttcaatttgttcattaattgagtaaacattttgtcattcaatttagtaagcggtgattgtctttgtttttcattctcttttttcttggtctcttcattttcttctttttcttcttcattatcttgagtggcagcaatagatttacttatagttaaatatgacaatgtatcattaactattccttgtaacacaggatggttatatggtctcttctgaaatctcccctttttattcttattaaaatttttcatttcttgcaaactattttcatcccatctgtgttttctttgtaatttcgataagaactgtaatgcttcataatcactgaaaaatgcatctctagctttaattactctcatcactctttctgtctttcataaaaattattcttatatgtgtatataacaattgctactaatatttaatgggaattagaattttcagatcttgttacactccgattagttcttctacgaaagagaaagaacaacaagaagcatatgctgtacctgttttatgtgtattcggtgagtttaagttttcttcaaatttgctcctaattcatttgttttttgcctttttttatttttttttttcgtctttttttcccgttttcttaagtattgctggagatgagatgaatagaattattatgcttcagccgaaaggagtaaatgctcatataattgattattgcaatcaatattgcagccatatacatatacatgtgtgtgtgtgtacttatctgtggttatatgtaatggagaaaaaactattgattattattatataggtctatttttttttctatataattgaataattatattatgaacgaataagaaaataagtttaaaacgttataatgttaagatagaaaaggaaaatataaaagtaagaatattttaatgcatgaagaaagatagaattagtagacaaacattaaagattggactagataaattggaaccaatattacctgaatgtgtgcttactgtatacgaaagttcttttgatgtagagacagatttggagctagcggtagtggtgggtgaagttttttgagttgtatcttttgaagagggagaagaggaagacaaagtggtagctattgtttcatgtggtggatttatggatttagtagtagatgaagagggcttggaagaagaagatgttaataatgatgataaaatagaagaggaaccatgtgttcgggaaacggttgaagaagtatgagacaaagaagatgtagaagatgcagaagaagatgtagaagaagaaacagaagaggaaatatgtgtttgggaaactgttgaggatgataaagaggtggaagaagaagaagaagaagaagcagtagaagaagaagcagtagaagaagaagcagtagaagaagaagaagaagaactgtatgaaagacttacacctgcagccaattcattaaattcagtttgagcctcagaataacgaccattaaccttcccatctttggcaacaattgattcccatgaaccagaggtcccatcgtatgaataactttcaccagtagaataatcagtgacaataatttgtttaacatacatggtgaatggaccagcagagtaatctgtgataccaccggcccattcgatggttcctggggcattagatggatcaccaccagcccagataccgaatttgattgacattggagtttgtgggtacccttgagatgtggtattaagcagagttctcaccacggtaccatcaagcgaccaagtagtctgttccattgaccagtcaatggtatagttatggaacatttgagcaggtgtttgcactccgtgaaattcacctctatcataagtagtgacatttcccttcgagaaatagtttgattggaattgagtggtgtcacctcctaaccattcaagatcgatttcatccccgtcgtcactctgtaagaaaaaggatgacacgataccaacacctggagcagtctgcattaatacctgaactttaccgtacatgatatagaaattggaatcgtaggatgggttgtcacctcttttggcaaggattagacctagaccattagtggagtcaaaagttacctttccctggctgctacttactctactgaaccacttggaatcagattgttttgtgaaatcttcgatgaaaccagtagctaatgctttatcggggggacaattagtggtgaatagtggattgcatgtggaggttgctgctttgacaaaagtctgaagtagagtagatatgagaagaaatgacagcaaaatattatttttaatagaaagtaccatttttccggtgtttgttgctttcctcgtgtattgatatatatatacgtgtatgtgtttttaattattatacttatgaggtggactattttttggtatgtatatatatatatatatatcaaatgagaattcttgatggttaagaaagatgatagttacgcttgaaagacctcaaagcgtatagccgcatttttcaaactgatacatgtaagcaggtgtagtctctgtaatgtttaaatatgtatatatatatatatatagatatatatttatgttcgtctgtgtatatttgtatgcttatacgtcatctatgtaataattagtttgttatagatttttggtacaaaaatagatatataacccagcaggtaacgaaatgacaagatgtatctgttaattataattaatagttactattaatagaaagaataaaaagtagcaacgaaaaaaaaaattctggaaaaaaaaaaaaagatggagtatctacagaaaggcaaacatttactaaatagagaaattttttcccaaaaagaatataaattaaaaaaaaagcataaaagaaaacaaatgcacatactatcttgtctccagggcttagagtaaatcgacacctttgtgcacacacagaaaagaccctttcttcagtcgagatttatgattatccagcccacttaacccaatccatcctaacgaaatccaatccaatttaattcattcacttatatgctccaagcctctaaagatcttgttcgagcatagaaagtctatacaaagttgaagacgtattggtgtttttttcttttaccgatctctctctttttctttcttttcttgtaataaagcagaagaactttccccaattgggaaatataattaaatctctgcgaaacgcgtgctgcaaaaagacacgtattgttttgtgataattccctgcttttcgcgttgctcgagggaaggaaaaggaaaaggaaaaggggaggcagttctggtggacagacagcgtcgccactgtctgtggtagcggcgttgtgctttttgacgattgtcacggtatattgtggaagaagaatgggaaaggaacaaggggaaactgataattgaatatttttcaggaaagacggtttggtttgatgcgggagagatgactatctggcagggtaagggataaatccttatgtctgaacaagacgttatctgtatttgtttgtatactttgcttattttgtgtatttatttatctgtgtcgacatggacatgacttagaatattgattaaaagtaagttccttcgtctccctttttctctttccttctttatttctgcttaaatgtctcctttcctttcttccgttctccaccccccccctcgccgcccactttcaccccccaacgcttctaaacttcactatattatatataattgcttcttgttgaaaacagtgtttaactaatcttactatacagtcgtattctttcttagtttttacttaaccttcacctggaactactaaaaacaaaaacaaaaaaaaaaataacaaaaatttaatattttctacttaatattaacaagtgtatatatttatatctatacttatacatattcacatcaaactgtttgagtacatacagatggttatggaacggttagctactcattcaggtacatggtacccatcaaagaagaagattttagagaatcaacttaatataccaactgtatcttcctcatctaaaaatggcacacgtatcatcatatcgcctcatgcaggttataagtactgttcaaagaccatgttgtctgcataccaatcattaactttccaaaacttttccaatcagaaagatcatatggataaaagttcacaaacagacacatccagggacacagctggcgatagtggtgatagtggtgatagtggtgatgtacgagtatttgttattggaccgtcacatcatgtgtatttcaaagacaaagttctgctgactagatttcatcgtttagaaacaccgtttggaaatttacctgttgatacagagttgattgaaaaatgggtcggcctatatcccaaacttttccagtatatggatccagatgttgatttagaggaacattctttggagatgcagtttcctatactctataatacattattgagtcgtaatgtaattccaaagactggtaacaatgaggaagcagaggaggaaaaggcaaacaagggagaagcaatcagggttaaggtggttcctatcttaatgtcacatgggtcggaatcaatgtataatggattggcaaagattttaggggactttttacaagaggatccaagcagttacattattatatctagtgatttctgtcattgggggagaagattcgattatacgggttacgttggatctatcgaggatttacaattggccatggacgacgagacagagatcgagatgctgacgtcaagaagcaaattgtcgcatcatcagatccctatttggtcaagtattgaaatcctggataggtatgctatgaaagtcttagaatgtggagatcctgaactatggaacaaatatttggatattactggcaacaccatttgtggtagagaacctttacgctgtttattgtatgtattgaactatatgaaatctaaatatagcgcaggttttgattggaagtgggataaatattcacagagtagtcaaatcaattctgttgcagagagtagtgtaagttatagttcagggcacataacgcttcgacaaaaaggttactgtgaaaaaaaaaaatgaaatgaaatgaaaaaacgaaatgagatgcaaaagtaacaaatattcttctttatattacgtgtacatgtatatataataatggcaatgtatatgctcgcaagtaggtaaaagttatgcaagataagacacaactctatttaataagtttatttattatatttctttatctttatataattatataagtaatatcgttatcgttatataagaaagaaaaaacataaaaaactcgtcaattacaaaaaacactttataactaatgagaaatcatatacgttaaaaaacagttactgaacataaaaaacataaacataaacataaaagaaaaaaaacttacgaaaagagatattatctttaaggatatgcttagttagcagcaacgtgttcgactaagtcgacgactctggtggagtaaccgtattcgttatcgtaccaggagactaacttgacgaactttggagataattggataccagcagcagcatcgaagatagaagagtgagagtcacctaagaagtcagaggagacaacagcgtcttcagtgtaacctaagacaccctttaacttaccttcagcagcagccttgacggtagccttgatttcatcgtaggtggtttccttggctaacttgacagttaagtcgacaacggagacatcgacagttgggactctgaaagccataccggttaacttaccttgtaattctggtaagaccttaccgacagccttggcagcaccagtggaggatgggatgatgttaccagaagcggttctaccacctctccagtccttgtgggatggaccatcaacagtcttttgggtagcagttaaggagtggacagtggtcattaaaccttcttcaataccgaaagcatcgttgatgaccttagctaatggagctaaacagttagtggtacaggaggcgttggaaacgatggtttgaccagcgtatttgtcttcgttgacaccaacgacgaacattggggcagtaccagatggagcagtgatgacgaccttcttggcaccagcgtcaatgtgcttttgagcagtgtctaattccttgaagacaccagtggagtcgatagcaatgtcgatgttagaagcaccccatggtaagttagctgggtctctttcttggtaaacagcaatcttgtgaccgtcaacgattaagtgcttgtcatcgtgagagacttcacctgggtatctaccgtgggtagagtcgtacttgaacatgtaagcggcgtagtcgttggcaatgaatgggtcattgatggcaacaacttcaatgttctttctagataaagcaactcttaaaactaatctaccgattctaccgaaaccgttaatagcgactctgaccatttttgaattttataaagcgtgtttgtgtatttgtgggatggttttctttctaccgtgaatgaatacagaagaaggagctgaatttagggataaactagatgaagggaatacaaccacaagtttcaaaactgaaaacatccatatttatatatatttttgaaagaagagaaaagaaaatattaaggaagagaagagacagagatagaatgatacataaagagagggacacaatattacaagaaagaagaagggaaaggagctaacactgagtgaataagagcaagaataaaaaagaattaaaaataaaagagaataataagaaagagaataataatagtacacaacaataccaacctaaacctaattttatcacgactgttactgtcactattattattattattattattattgttaacatcattattacgaacaacaaattgaggaatgagattaagagaagttttgatagaaagttgaggaaaaacaagaagaaaaagaaaagaatcctaataaaaaaccagatgtaatacgtctcagacgttactgatcattctattttacttcctccttcccctccttccttctcttccatattaaaagaaaaagagagagggtatgtgtatgtgtttgtgtttgtgttgtatgagtgcatgtgtgtgtgttgttattattattgaagagagaataaaaacagaaggcccaaacttctactcaatttaccactcgtgtgtaattgaattgagaggattgttgaaatcacatttggatattttggaaaaagaataaaagagagaaaacatgatgttgatttgtttgatgatctgtttctgtttttgtgtttgttttgggcgagaattagtggattcccaagcggtttcctgtcagattttcactttattttaactttacttctttttttttttttgtgtgtgtgtgttgagatgaaatggggagagggacaaggcggagacaaaaagtttgaaggcaaagggagagatacctgatacatttttttagtggttttttttccccatttgggtgttgctccacagcttccactttgttggaatcaccttgtttttttttaacaggacaagtggattccgtgggtgtccagatgtattgtcacgtgctgctcacgtgaacaaagtttttccagttttttggtttttttttttttttcctcccggaaacccgtccctttaaatttctaattgtgtccactcaatacaattcagttaagtaaataacgtgtttattacatcagattatcatcattatcattattattattattactgatattactattatattcaaaataaacatatataataaatatatacacatatatatatatatatatatgtgtgtgtgtgtatgtgtgtgtgtttatataccatattacacataattgcggacgacttctacgggactctacagtctctctgtctatggttttctatctacaatttttgctttctgctattatcaattgctgatctttatttcaacaggttccacccattgtaatttccttctacagtatgactgatatggtggcagtattaatacacaagtaacgaatataaaacataagtagcatattagtagttgtagaatagattgagtaatgaatccaactatacaggatgttaaacatccaacaagcactagtagtatttgtctcttgtatgtatctctttgagattcataatctattggtaatgtgaacttctcagttataaagttgttcatcctgtagttttgctttttcttttatactttttattctattttgttttgttttgttttattatgtcttctatttttgacctcccaaatttcgataatgataataataataataataataaagaatactttatcttctattatatttccctggagtaaatgtttgctgtttttttaagttaaaaacagttgtctatagttaagttgtggttgtgtagtccagcagaaatggagataatgttactcgctagtgttggtaactacctatgttctctaacaagtaatacaatattatatacttcttactacgtggttttattttcctctttatctctttttctggtttttttccatttcccttcgtttgttctcgttttttttccttttctctctctctctttttctttttttttttttatttttcttcttctggttcttttctttaaagaagaatcctcactttactgtttgtacagccatgatgttataaccgtagtatattagatatctcgtataagatactatgttaatgttgctaaaaaaatacacacacatatcttaggatacacatgtatatgtatatgtatatatagtaaacacaattatttctctcttttttttttgtttccctttccgtttttatttacttgtcacagatttaatgaaccatcaaatacttcctcatcctttaaccatgttataaatttaataaaggtatcacccttggataaatcactttcacttatcttacattgatatctttcgttgaacgatttgattatctttggctcatgtgtgaaaatatcaaagatcaaacaattaaataaatccaattctaccctccaggaatttattaattcttcatttagtatcctgtttatattatcgtcatatattatgtcgttattactcgtatcgattacaccattcagaaaatttattatattgtgcaatccaatctcacaattatttatctggttctttaatttgatttcgttgtcgttgtttgttatgtacttattcattacatctcggattatgtcatgtaatagacttagcaaatcttgatcatttaacattctccgaaacttaataatctcatccatctcatctttccaactcttttcattagtctccttctccttccccttctccttccccttctccttctccttctttgtattattattattattactgttgttattattattgcttatctcctcactatttgtaatttctattgttgatcctttatttaataattcacggaactgttctctcaatattattatttttttagttaattggattcgataatctttgttgattgacgtgatgtttattctttcaaaataatatagtaaatatattatatctgtcatataatgtgatacattcagtatcaacggaattatgcttcttaataattttattttattatccatccctctaattaattttgcttagtttatttttttttctctcttgctagttcttctgtagaattcttctcttctccatctaacttacctaacaagtccttattattattattattattattattattattattattattattattattagcactttgcgttagcttgttatttcttgtcattgtctttatctctttcagtttctttcttaactgtggaaatttctgttttcgatctagtcacgtgatcacattgtacagtccgggtgaatacattatccctttgtaaataaattgagttccttgctactactcctgttaatataatataacatattggtagttgattctctcctttccgccctctctcacaataattgattagtcagttaatttagtagcagtggtactactgttgtcactatacgtatctgtatttatatctgcaccggttgtaatcgttaacttgttttttttcatttcccatggtttgtgtctaacaggtaagctggatttgcttatcatatcactagaaaggacaatatctggaacattgatcagattgggcacttctttattttgttgaatgcactcaataacttcttcataactcaactgctttaattctgtattttcattttcgtttttcttcttgtttgtcacaccagtggtgttggtaatagtggcagtaggagaatcaatgttagtattttcactcatatttaacttcgttgtatacggccacttcgtctctttttatatcttattgatgtgaaccgtaatatactatatttgtatagttgattgtaggtttcttgtgtgagatatacgttatctcttttattttgcttttttggtttgtttgttttttttttttttattttattctattttatttagtttgttaatatttctatttagttattttaaagaattaaatatagatagatgattgaaaaatacttggaagaaaagagaattcaagagagggtatgaagaatcaaattataaatatattgtatgttctatgtattattagaaagaatgataaataaataaataaataaataaggagttactgttgctacttttttttctttaaaaatggaaaaatataaacgaacagttgtgtctaaatcaacagattattttaaactattaattatactatcaatggttttacgtcttttattttttgcatatgggatatatcaagacagccattttaaagtgaaatacacagatattgattaccatgtatttaacgatgcttcaaaatatattttcatgaaaaatggatctccgttcgatagggatacttacaggtacacgccactcttagcttggatcgttttacttaaccattggttcaattggtttcatgttgcaaagatcctcttcattgcatttgatatcataactggagtgatattgatcaaattgttgaaatctactttatcggattccaaaactaatcagaatttttccattaataaaatatatttttatgtctcttcaatttggttaatgaatccatttgttatcactatcagtactagaggaaactgcgaaactttattatgtttcttaataatatcaactttttatctcatgcataagggacatatcattttgtctggtatattatatggattaagtatacatttcaagatctatcccataatatattgtggcccaatatctttctatttgttagtatcgtcatcacatagtagaagtatagaaactaacaagaataagaataatattaatattaatactgaagccattttaaattttgttaattttggtatgatttcattatttacattgactttaactacatgtggaatgtactacttatacggagattcgtatctacaggaagcttggctgtatcacattataagaatcgatcatagacacaatttttcagtttggaacgttttgctatattatacatcaacaatggattcaacaaggttttccttagctacatttgcattcttaccacaatttttcatcaccataataatatgcggggtatggctaccttatcacatcctttatcaaaaagttgaagatagaaataaatataaaagtaatgatgttatcactaaatctgatcaattcctaaatcttttaaagattatattcatacaaactttttcatttgtaacgtttaataaagtctgcacatcacaatattttatctggtatattattttcttaccatttgtaatagttgacaacaaaaaaatggactggaaatgggatggcatcccaatgattatattgtgggtcagcacgcaagcagtctggttacaacaaggttataatttggaatttttagggttaaatgtcttttatccaaatctattatttgcatccattggatttttcttgactaatgtatatattattggacaatttattcaagatctaatggtatagtcatactagtgttttaatactgtgcaaatagcatctagtatatatgtatgtatgtatgtaggtatgtgtgtgtgtgtgtgtgtatttacgtgttcagacacctcatcttatcccagctcgatctcttcagcatacaatttttttttcagattacatcaattttttttcttattctcttgttagtttttttttttcatttaatcaaatgtttaaagtattgattttaacatatgctaaatacagagggtatctctatatagatatgtatatggtttcatatatgtagcgcccctatattggaataatagcaataagcaaatatcttaatagccaatattaatctgatagatcttaaaaaaacaaaaaaaaaaaaaagaagaaaactggtcttggttcacataatataataaaatataatagaccatagtacatcaaagaagagaaactaaaagaaataattagctatgtcacgtttagaaatatactctccagaaggattacgtcttgatggtcgtcgttggaatgaattacgtcgttttgaaagttcaatcaatacacacccccatgcatcagatgggtcttcatacttagaacagggcaataataaaatcatcaccttagtaaagggaccaaaggaaccaaacactagatcccaattagatccaaataaggcaactttaagagtcaccacaaacattacccaattctccaaatttgaaaggtccaagagctcgcataaaaatgaaagaagagtgcttgagattcaaacctctctagtaagaacttttgaaaaggctataatgttacacatatatcctagaaccatgatagatatcgaggtacatgttctacaacaagacggtggtataatgggatccttaatcaatggtatcactcttgcgttagtggatgctggtattgccatgtgggagtatataagtggtgtaacggtagggctttatgatactacacctttattagatgtcaattcattagaagaaaatgctatgagttcagtgactttaggtgtcgtgggaaaaagcgagaaactgtcattgttactggtagaagataagattccactagatagactagagagtgttttggctattgggattgcaggtgcgcataggatcagagatttaatggatcaagaattaagaaaacatgcaaagaaaagagttaaacatgcttcttctaactagactgaactgtaccatatatatatatatatatatatatatatatagacaaaaggatatacagttgtatagacgaatgtgtgtataaaagaatagatgattgtatttatacgctgcgttaaacacacaaagaggctctcttttttatttagtgagaaaatcgaaagagtgcgaaaagcaaaaaaaaattaaattaaataaaatgaaatctaagaggagaaataagaaaaaagtttaggctgtaattattcaaaaatcattaagctttggatataaagaaagagctgttaaaatattttgtcactccactttcgctgttggtaaaaggtttataggaatcactgattaaatatacaagttttaaggataaaaattacgatcttgtatattatttgtcaatataggtgaaaaaaaaaaaataaataaataaaaaagacaaacagaaataacgaaaacattattattatgtctggattgaaagaagttatttattgtgaagtttgttcctacccaccagactattgtgaattctcaggtaaattgaagcgttgtaagaaatggttaaatgaaacacatccagatttatacgctaaattatatggtgattcaggcgatgatgaagtcactaatttaggtaagaagctagtagaatctagtatcggtgaggaaagagagaataagttggaagcagatcttctaaaattacaaaagagagaagaaaacaaagagcaaagagaattggccaagaaattgtcatctaaagtcattattaaaagagaagcaagaactaagaggaaatttattgttgctattcaaggtcttgaagtctttgagattgatatgaagaagttagcaaagacttttgcatctaaatttgctacaggttgttctgtatctaagaatgctgaaaagaaggaagaaattgttattcaaggtgacgttatcgaaagtgtagaaagttatatacagcaattattagctgaaaaaggtctacaagatgtaaaagttgaggtcattgatacaaagaagaaaaagaagccaactactaattccactgaaagtaaatgaataaggatctgtctgtatttctgtaaaaatttaacaatcctttttaaatataccgataatcaatatatctacttatatagtggagatctttaattaacacctgtgctttgttttttttttttaaaaaaaaaatgttttatttttattattactattatttacatcaatcataatgatacatatttcgtttttgatgaaaggacataaatatatgtgtgtgtggactcatttatttgtacttgagaatgtgtataacgcattagtaaatgtgaactaaatattattagttgtcagagtgatcatcatcattagtttcttctgaagtttcaactttgttttcttcctgaattccagatttattctcattctcactattactgtcacggtattgactttcatggtcatcagtattttcttcttcctcattttctctttcagaatgaataacagatggtacttctcctgtaaatttttctgcaaattcagtcgctggcgatttggggatgataagttcatcttcttcctcttcgtctttatttttgatgtttttttgtcttcttttctcattaatgaactttcgtaaactgaaagattcatcagagtttccgccagtcaatttggaatacaaattgttgcctaatgttttccttaataaaatttctctaacttcaaaatataaatcctttgacgaattattcaacaactgttggtttttcttgaaatacgatctgaaatcttggatatgtttcttaaattccaattcattttttttcaaccacgacacattcaactcttgtcttgttgcacctcttgcgaagtttctcattaaatatttatcatagtccctaataattttagtgataatatcacttgtagagataccatcggttctttgagttgttaagaatttacccatctgtttaataggtttatagatatcgtcgttgtccccactcacgtaaggaatatcatcatgggctacataatcgattttatgtttttgtaagaattcaggggtaacacaccatggagcatccggtataacttcatcgacccatttacaatgcattagggtctcgcaacgttgtttatcagtcaagactgttaaacctttcaatttgtgggtaattttatcgtttggtatcccacagattagaaccacattggggaaagattttttgcattgctccagttgtttcatatgaccaagatggaaaaggtcaaagacaccatctgcatatattcttattggtctatcctttgggggtaagtttaacgggaatcccttcggtctgtattttcttaattcttttggtaaagcttcatcatattctctttcatgaatcaaaaattgttcatgttgatcatcaacagtcgattttttgttatcatctaaacgacgacgtttagtgtcttggacttgtatatcattttcattgtcatggctatcataatagctatctgaatcagaatacttatcttccgaatcatcagagatgtcattatgagatctcttcttagcacgctttttgaaaagcttagaaagtgaagaagaggataatcttttctttaaagcagctgttctattcagttttctttccatattgaagttgtatgctgacgtggagtttactataaattcatataacgatgcgtgttgttttttttgtccctaattattagttaaccaaacagacgactagaaaaaatatccagaaaaagaagatgtatgtacgtagtagaagaataatcacttcctacctgtctttgtgtaggtttatacctttatgattatatgtatattgatatggctagacccttgtatttagtgattgatcaattgttcacattcttcttcttcttcttcttcttttttgtgtttattagcttaaattattatcttctttatggaaagttggtctctcttgttttttgtattttttttttttgttctttgcaattcaacttcattgtaaattccataggaaaattttgttgttactatcaagagagagagagatagagagagataccagagagagaaaccaccattgcagtgacatctactttgatgttagttatgtgcgtttgtatcttgtcattacagtaatattattatttgcttataatatggaaatctatatgcatatacatatatatatatgtatgtatgtatataatggttgtttggagtttaaccaattcttttaattaagtgaacaccactgtcagtctcgacaatgtcactgatcttaccaataggcaaagagaatgcaactttttcgaagcttggctgcatttctccgcgcccaaaccatccaagatcaccacctcttttataagatgagcaatcagatctttcgcgtgcaatattctcgaatgaatctttgtctttatgatgaactgtcttatccacattgtctttagtaccagcactgcgaccactactaacatcctccttctcgctactgtcttctgtctttttcgaggtttcttcttcattaccataattcagtcttccttgaatctcttgtaattctttaattgcatcctccttggatatagttatcttagttgatctatgtgatgcaggtctccgagaatctttgtgcttaataaggatatgaagacaatggactttagttggattcgtagtcaggaactttttcagttgattgatgtctgtattggcaggtgcttcccattgtgatttcttggtttcactgttgaaaaagtattctctttttttggatttactgtatctgatagtccaatgttcagggagtcctgtgtctgtcatttcagtatagatatatttaggtgagtggataaaagtcgatggaagtgattaaaagtcaatatctgtttaaacaatactctttgttggatgtgtgaagatgttatgtaataactataagttcttgtgttcttgtgtgcattcctctgtctctacgttgtacaattgatctttttcttttcttggcttcgttttcttttccctttcctgaatttttttttgttttttttttttcactttctttccttttatgagcaaaaaagaaaaaagagaagaaaaacagtcgtttattgaatttttttgaatcatttaataaaggtagagtgaatattaaatagtagatagatagatagatagatagatagatggatggatggatagacggatagatggatagatagatagatgtagataaggatatagatatgtggagtggtcatatgaaaatgtaggggaaaggagttgaagaggggaaaggtgggtcatgcaggagttttataaacgtgctttaatatgtgacactggtggataaataacaagtccctcttgtgagacagacgccacaatttggccactttgagcatcataatgttcacattgaattaaatggcggtcagataccgatcttatattgtgtaactgcaatcttaaccaatcattgacttttggtaaatgatggaaatatattgtgtgatctaaggatacactgaatgtatgcgaatacattggtaatccatggaaatacggtaaggtcagtagcaaatatgagtctgataggtatgcaaatgcaacataattgtatcttgggtcattctcgggagttattagttcattttctggatggtcttgtacatgtaggttaggagatggtggaatttttatagaatcctctcttactctaacaaaatattctaagcatttagaatattctttcctatcaggtttgaatatgtctaatgggaacttatattctaatggatgcatctcaaatgattcatgaacttttttcaaataagttgggtcattgaacctttgattcaatctttggaatttttttaaattgatttcattattgagaatatcttttttaaacaattcactggctttttgaaattgtcttttatttgttactctatgactaactgttttatgatatttaactttgtcatcatcattatcattatcaccatcagtacgatgctcaatggtcgttttcggatttttatctctagaaaataatatcattgacgaaaatattaatttgttaaattggtaagcatcaacctgtttatgaatgaagtttcttccatttctcaaacttttgacatcatattgaatcatttcatttggattcccgccatatatgaaataacagtgcaatgatattggaataaaatctttaggtacagtgtttaatgaggataataaagattgtgccactaaagtgcctccaaatgtacccttggcacccacaggtgctactggataatttttggtaataaaactggttcttgataaagctactaattccaaaaggtctttcagtttagtgatattcattgttgaacgaaaaaagttccttgatatctcgattcttcttgattttctaaattctttcaatattcaatctgttatgagtttgctgtagtagcgaatgataatggagataaagaatgcaatattgctgtcctcgatccgatttctatctcgaagtattttgttttcttcttcttattcttctgtggtttttccccaatttatttctctttttttttttttgcttttcttttcttttcttttttacttcgtaacagtttattggggaaagattgtgttattatctttcgatgctgtatataccataaagtggctctgttgcctatagggaaagttatatttgatgttagtgttgctcgtgggggtagaatcggaaatcggtattgagtgttaactatatgaactaattgtttggttctttatttgcttcttttttttttcccagtaactagattgttggtgtccatctgttattttgatcctgcactgttaactctttatttatatcttcccaaggtattaatgttctgttatgtctatgtcttttagtttcgttatttgtgttgctgttcacgggatgttttttgtttatctccgtagtcatagtcgttgtcgttgtcatcgtcgtcattgttccgttctccaactcttcccttaaccttttggaacgtgcccttgttatgggtccagatgttgtattggtagtgcgaattaaaaatttagatgcaatagtctctttattaattgaagtttgttgtgattgtgaaagaacaggagtttgtacgccattaattttaccgtttgtctttgcatttacctgctgttctgtaccgattctcagtctctttcctctaccatccagatatgctgtcgaattgctactacttgtggttgctgagtttatagaggtgattatatcgatattagtgcgctctagcctttcttctaattttatctgtcttttaacgacattgttcagttcgctcgatattgaagacatgaaacatgtcatttgagacaattgatcgttaatatttgtacatatccattcaatttttttgcttgacaaactaacttgatcttcagtagcagcctttttgtttttgtttttattagattgttgagattgaaaaagtttagtgaaatgcattatttgtttctcaatattcataatcttaagctgtaatacattaaattgatcgttctgttcatttctatatacatccaattcatcagatatcttgctaatagactgtagattgattccatttaataagtttcgcaataatttgacgcaattgtttaattcatctttctttttattgaaaatatcaatcaatatggtggatttttctcgtagttcgatagtctccaattctaatttactcgcccattcaagaatttgcttgtctgcttcttgatctaacgttttattatcgaatgaacatattgggacggatgaggatatacttggtgatgatctggtgtctgtagtaagatcgtccaagtttggaacagtatcgttggctgtaatggtagtagtagaaataggaggaggggtggcgcctgcggtggtcgtcatcatagtggtggtggtgttgtaaatagatgaaaagggtttcatttagagaaaagaagaaaagaaagggaaatcaagatttaaaatgatcggtgagagatcaatggatgagaagatatacacaattccttatcactgtttctaaaaatgtatatatggctagttatctactggtatacagacgtgtgtatgcatacatatatatatatatatatatacatagctttacagctaaatggatagatgtcaagtctttttcttcttcgtgtcatgaagtacccctgtgttccttttgcagttctgatttattttatctttcactgagggtattttatttttttcatatgtgagattcctttaataatatgaaaaaaaaaaaatgaagattggataaccaatggctatgtattgacagatacaaatgacagtaagaaacttgctgaaactaacagtaggtatagtctatttgtgttgttaagaaacattcttgtaataataataataataataataataatatttataaaatttataataataataacaacgtattaagctatatgataagcacatgataaatacaagtatagtttaaacatttagttaagggcgaattgtaagagataagaaacgaggaatagaaagttactttagaagtaatgtcaccattgttaaaagaatatttgcataagaaagtagtagttgtgaccacggatggtcatagtataactggggtgttagaaggctatgataagagcatcaatattctattatcaaatgttcaaagtaattataatccatcaaaattggtcaataatagtagtgatggtggtactagtgacagaagcaataatataatttcaatacaagtatgtcgaggtagtgaaatagtattttgtgggattttatcagaagaaggtggggaagaaaaaatcgagaaggaggcaggaacagatactttaaagaatataacacagtgggatatacttaaaactactaaaaatataataaaagacgaacatcttacatggagacaggtttggctacaaagacagcaaaagaaaaacagtaatacaacagagactacttaaggttgtgtgcagactaaatatgtatacagatatggatatagagatatatgaatagatacacttaatacacctaatatatatgtgtgtatgtatgtgtatttatttttcagttctgttggttttcttatggtagttttgatatattttctatatttttcttttttacatgtatctatatatgaatattcaattgatgcattttaatagctaaacccaataaatagtctatagactcgttataaattttagctttatcaatagtaggtccccaaacaaataaaccatgtcttctaactaatacagcacaagcattagggtacttttcaaaaacatcttttaaggaattcaacagatcatgttcatgtggcctattatcgatgatagggatacataagttgtcattgaatgaaagattgatctgttttcctgtctctggatcttttctaccactaggcatagcttttatctgttccatattagagatattaaattctttatcaaatagtagtgttataagaacactattctgtgaatgagtatggatcactgcatttgcatccttatgttcatgacatgctaagaataatggagagcaatcactgattttcaaaggaggagaataaatgatatcgtatggatatggttggtttctgtttttatttttattctcgtttttagttaaaacatataaatccttgggctgcattagttccttttgaacaccagaaggagtgatataaatgtaattagtagttgtgtctctaatggatatagcaccaccagtaccaagacaccattctttgtgaaagaattggttcgataatgagcatatcaaatttgctggatgtcttgaatcaaaggaatgaattgagtccatgttttctttcaaagaagggaaaaagtaaaaaaagaactagatagcagtaacgttttaaggggggggggagagaaacaaaaaacatcctgtatcaaaccatagcaaagatatatatgtgtgtatgtgtcgatgtttatcgtttattgtggttaaatgtagtaataacgatattttaagcttacttttgtttttgtttttgtttttttccttgttttctcaatcttttatgttaaaatataattattagagctatgtttgataatctaaattcatcgtactaagtgattaaaagttatgaaaatttatagtaaagaagattcaaagataaaatgagtatactgtataatattgtatcttgtatattacttatatagaaagaaaaggaccaagcaataaaataacaatttatagtaccactaacttcctactataaataataatagaacttataataccaccaatatcctattgtaagttacattatcttattatattagtttaaaatgaactcgattagaatttttgattctgaagccttgcgtcaacattttaaaatgtgaaagttttgtttttgcagtgtaagagagatctaaggcttctaaggattagatgctggaaaaacagacatagacagagtgagtgtgggggaggggggaatattctaattggtagcacttgtgaaaagactacaggcagatatttatacagaatttttttcaagagtactaagacaggtaaagtcctttcatgaaaaaaaagaaggcggattatttagttaaagaaacttgagaacttaacattactggaatagtatatgtatgtatatatatattattcctactgataatttatatatttacttttgtatatgtgatttttgttaagaaatatgaggtggcacccgaattgtaacttaaaaatggtgtttaactataaaacgaaggaggcagatctttaaaatatcggaaagcataataatttggcatagcaattataatgtcttctattattgttgttgttgttgtcgttgctcttggtgtattatttatgtattttttttttatttgtttattttattgatgtcagctttacgttttgcaatgaaatttaacttttcagtaagaatagataagcaaacaagacataaaatgagacttcttaaagaataatgtaaaaaacatgcaaacgttttttcaaaataaaatttaaatataaaaatcattcaatgataactaacaaaccatcatatatacacatacatacatgtatatatgtatgtctcccatcatacatcaaaaaaaaaaaagactctttaacttttgctttattcgaattagagttgttttcctatttggggatatatttcttattcaggatagcaagatcagtcttattttccaaaagaggaaaaatcttaaaatctttagatcttttctttttttttctattttcttttttcttgtcctcctgtttttttgttttgttttgttttgtttactacttgtgaaattcattaaaagtagtgttacacaactttgaaagagagacaaaatgattaaaacatcatatagacatatatttacattcctgtgatatccaatgatccagttaaagtaataatatatggtttattattagttttgatagatatttcaattctctcaaaaagcaagaaaacattctatatatatatatccaggcttattaaatttgaaaacacacattcattaagaaaccttatttttgtttacaaaaagtttttatcctgattagttatttgtttgattttggtttcattatcagttttatataaatgagtctatccactgaagaagaagaagatttttctaaattacctcttgatgaaagactagtacataaatcatggaaggcacgtctgaatggatatcaacaactccaaaaacaattccaaagtccattcccattgccaagtgaatatgaaaaatattggtcttatccaaatctattccataaatatattcttgatcctaacgttgttgctcaagaaaatgcattatttgctctacactcaatgtttttcaaacagattcccgatatacagaatttaaacgatttccccatacacgtttatctagacgaatggttggcaccattagttacgaaagcattgaattcttcaagaaacaagagcaaagatttgactattacttgtatcctgttactttgttccttggaccaatctgtctataatatcgtgtcgcagattatcgaacttttacctaccgtcaagatacctaaactgattgcatctataatatcatgtattaatatcatattgacaacattcgaattgattaatgttgaaggttctgctttgattgaactattaaataaaatatttgccccattacctaaactggcgtctcatgcagataaaaatgtaagagctaatacaatgacactgatcgtaactctgttttgtttattaggcaaaggtaagaccttgttacaggaaaccctgttggataaactgaaacctattcaacaaagagaattagacaaacaatttagttcgccagatattaaattgggcgatccttttaaagatagcgagaataatgataacataatattatttgaatggaaacggagagcagatgaaaaggcaaaacgagaaagcgaattccaattaaatcaaaatggtttggatgcagacggtgatacaaatatggaaattaatattggctccaatttaaaagccaataccgcccccaaagttgacccattccagttattacctgaagaagacttgttgtcgaatttgccagaagaatttgattcaagattgaagtcacctaaatggaaagatagagtcgaagtacttgaggaattgaatacagcacatttgaatgtaattaaaaaattacaaatgaataaaaattattcaacgatactgaaaactttatcagatgtcatctctaaggacgttaacgttcaatgtgtcactctagcatccgaggctatcaatatgatcttaatgaaactgtccaacaacgcgatccatgaaaattacatatctattgtatttcctgcattactagaaagaaccaaagagaaaaagcctagtgtcatcgaaatgatcaccaggaccatccatactgtatgcgatatatatgaacccttcatacctgagaacgagtcattaatcttaagggaactattaatgaaattgaatgatcgtattcctaatgtgaagcttgaatgtagtaaaatcttcaatgaattgttaggtaagacagaaaaaatggataagagatatatggtattgaaccttgttgatggggctaggatctttgaagtgattaaaaaattgatcaatgacacacagatgaatattagaaatgtgagttttatgattgtggctaaattgattaatttgttggggattgagtatttccatgaatttttagatagtattgataagattaaaagacgtaagattgaagagatggtgaagaatgatgaggggaaagtaaagctggataacaagacaaggattaacgccaacaatagtactacatctgtaagaaatattcagactgctggcaatataatgacagatccaaatagcaatactaaaggtattaccaatagtattactaatggtataagtgattctaattctaattctaattctaattctaattctaattttaactctaatcctaatagtaataatagactgaacaaaatcataccaaataagagaatagcgacctcaccaatagttaaaccaagtcactatgaaaatacaagttataaatcgcccagcattgatgataagtcatctcccatgaatacttcaagaaataaaggaagtatcaacacagtgaatatgaatagaagaaattctaaattggtgcaatcttcaagcgtcctttcatcagtttcgactccatataaagagaatatgaatagtaataatattagtattatgaataatcaaaaagataaagaaattagtggattgaggaataagataaaacgtttagaaagtgaaaatattcaatgtaagaacaagattaatgaattagaaagaaaagtaaatcaacatattaatacaataatgattaaagatacagaaatacaaaaattgaaacgacaatatgatgccatcatagaacaacaacaacaacaacaacaacaaaatcgtagtataacaacaagaatagttgataagggaaatataaatattccttcaaatagagatataaataattcaccgataaatagtatagatttaccaaataaggtaagaagattacaaatagatccgttgaaaagatataccagtgccactactgtcactaccaccaccaataatagtaataataacaataatgacaatagtaataatggaactagtgataatcgtaatcatagttttgattttaataataagaaaacatcaaatatgaatgcacaagatgttattaatacgacattagctactgaagaatcatggcaaagagctgcgttagtgacgcaacaattaaaagaccgaatcaataggatgaggaatcgtaaatgattatagtattatttctattttttgtaagaagaagaatagataaatataatatataatatatatatgtttaaatgcttaaaaaaaatagatgtatcaaagttgaaacaaaaaagaaaggcaagaatctattaaacttaagcagaccgggtgataacaaaagacttgatgatggtaataaaagacaattactacattctttgtaatcataaatataattgattgaaagaatattaaagtcactagatgttataatataaaacaaaacaaaaaaaaataaaaaaaaccaacaaaaagaatatgaaaattatttattattcattaagtgacacattacaatattgagacatcaagattaaaaagaaagcaaccagtaggtagaagagacatcaagaaaaaagcgtggtgtactggcgggcttccgaaactgccaaagtccatcagtggagacaaaaaatcgaaaaaaaaagaaaaaaaagaaaagaaaagaaaagaaaagaaaagaaaagagaaactgtctgctgtgtgtgtgggacacgttgcccaaacaagaaaactgaacaagactaaattcggatcagatcggaacttgattttgtttttgtttttctgttttttgcccttattcttatgtgtttgtgtggcgagagaaatgaaatgaaacgggtgcacgtgaaattttagaaaaaggtaaaggtaaaggcaaaggcattaagggttgtaattttcatatagtttaaattaggaaatggacgtatggggtgtacggattttctaaaggcagaagaaggaaaggaacacaaaaaaagagagcgatgctattgtcttcgtgtttatttttaagttaatcgcataatttattcaaaaacaaacaaaattgcataatttattcatttaactggactccataacaagattcctgccatacaaataaaaaagaaaaaaagaaaaaagaagggaacatagaaaacaaaacaataagccaagtaaaaacaatagagaaccttttgtttatttatttttgttgccaccaccaacccactgccaatttatttattgttattattattattgttattctcattattatttgtccctctcccaaaatcaaaatcaaaaaaaaaaaattgaaatatcaaaacatcgaaatatcgaaaaaagaaataatggaatgaatataacatttctttttttttttatcatagtaaaatggagcgagtgaatattttttttttttatttattttgatttttaattttctattaggtatccacatcttattattcttattgttattattattattattattattattattactattatcatgatatatggatacgtatatgccaattgtagatatgtatgtatatgtctatttaacatatatgtttttgtatggtaaacctttgaacttccattttattttgttttcttaagtttttttttttttatatataaacctttgatctgtctctcttggaacgtccgatgtcttcttctagtttccttcctcctctctctcttctcttcttttttctcctgttacatttcaaagtaaaaagaccaggccattgaagctctacatatccattcaaaatgtctcaaattactttaggtcgttacttattcgaaagattaaaccaagttgatgttaaaaccatcttcggtttaccaggtgacttcaacttatccttattggacaagatctacgaagtcccaggtatgagatgggctggtaacgctaacgaattaaacgcttcttacgctgctgatggttacgctagaatcaagggtatgtcctgtatcatcaccaccttcggtgtcggtgaattatccgctttaaacggtattgccggttcttatgctgaacatgttggtgtcttacacgtcgtcggtgtcccatccatctcttctcaagctaagcaattattattacaccacaccttaggtaacggtgacttcactgtcttccacagaatgtccgccaacatctctgaaaccactgccatgatcactgacattgctaccgctccagctgaaattgacagatgtattagaactacctacgtcacccaaagaccagtctacttaggtttaccagccaacattgttgacttaaaggttccagcctccttattagacaccccaattgacttagctttgaagccaaacgaaccagaagctgaagctgaagttattgaaaccatccttgaattagtcaagaacgccaagaacccagtcatcttatccgatgcttgtgctggtagacatgacgtcaaggctgaagctaaccaattgattgacatcaccaagttcccagccttcgtcaccccaatgggtaagggtactatcaacgaatctaacccaagattcggtggtgtctacgtcggtaccttatctagtccagctgtcaaggaagctgttgaatccgctgacttaatcttatccgtcggtgccttattatctgacttcaacaccggttccttctcttactcttacaagaccaagaacatcgttgaattccactctgactacatcaagatcaagagcgctactttcccaggtgttcaaatgaaattcgtcttacaaaaattattaaaggttattggtgccgctgctaagcactacaagccagttccagttccagctgctccagctgctaacccagcttgcgacccatctaccccattgaagcaagaatggatgtggagacaattatccaacttcttacaagaaggtgatattgtcttaactgaaaccggtacctctggttttggtatcaaccaatgtactttcccaaacgaaactgtcggtatctctcaagtcttatggggttccattggttacactggtggtgccgttttaggtgctgctttcgctgctgaagaaatcgatccaaagaagagagttgtcttattcattggtgacggttccttacaattaactgttcaagaaatctccactttaatcagatggaacttgaagccatacttattcgtcttaaacaacgacggttacaccattgaaagattaatccacggtgaaaaggctggttacaacgacattcaaccatggaagcacttaaacatcttagaaaccttcggtgctaaggactacgaaaaccacagagttgctaccaccggtgaatgggacaagttaaccaccgacaaggctttcaacgaaaactccagaatcagattaattgaagttatgttaccagtcatggatgcaccatccaacttaattgctcaagctaagttaactgcttctatcaacgctaagcaagaataaattaattaattaattaattcaactttatttgtttgtttttctctaagaatattttttaaccccccccctcctttattttttattcttaatttttcttttttgttgttgaactgcaaatagctgaattttttaatatatatatgtatatactgctatatgctccatgttagcctgttctagtgttgagtttttgaagttatttatagaatatatattaacgaactctcatgaatactaaatattttttagatatagaatgtttaaatcttttcttcctcgccctttaataaaagtaatagtgtaaattatgtgcgccgtgctttttctttaagtaaaaaaaaagaaaaagagagccttggctacctcaaatgacatctgtaatctcaaactaacgtacttactccctctctttcttccaacgaacgagtatatggcaatatcagcagtcaataattttaagtagaccaatctttttcatcatttattttcttatgggcaggtctgaaacttttaacatttatattcacggtcacgtacatttgagaaaataaaagattgaattaagatacagaagcattaaaaacaaaagcaaagaaaaaaaaaagaatttaatatattatcaatgtaacttgtgctctcttatttctttcatctgcttaaagaaaattttattcttttctacttttcatgtatatatgctggtagagaatttctttttaccataacatctatcattgaaaattttctcactaattattttctacaaatattaatcttttttttatcgtacaagaataaacttgcttcaggagactgaattcttaaaaagaatcaagttaataacacaacttagtaaagataactcatttgtaaggatagaattaaagtttattccaaaaaaaagaaaaaacaaactgaaaaagaagctccaaaggagaaaaaaatgttttaaagttactttttaaacaactaattagtgaattaatattattttttctggaatgactatcataatatttatatattaaagtttttttttatttgttaatggtcttattattattattattataagatcatatttgatgttcggatgtactattaacaagagatcttaaaaaaaaaaacaaaaatttttaaaagaaaaaaacagaagatgttcatttaattacatacaccatgtatgtatacacttatactgtatgtacaaactagaaagataataagacacatataaactataaagccaataggttcaatatttaaggtcacaaatgtccagtaaattcgaatattattcactaatttatcatgttataatttaaaaagtatcattaataattgttcgttgttcttcttctattattacataatttatttatataagagaggaattacagaagatagtttatcttcagaagttgttatccttttttatgttttttaaaattctatcaactattcaacttgtattggaacttggagcattcagcatccatggtaatgacagatattattacgttatagaagcttatctttgtttttattgtgtaataaatacatgtatatacgtattatatagtatataaagtatagattcttgtctttattttgattcttttttttaaagtttttcatttcttttcaaatctctaaaaaacatattttgtgaagaataaaatggtttcccatatattagagtacatccatacaccacataatacacagaaaaattaattaaaaataattcttatgaaaatgacagtaataaactttcaatttccaacatatataatcgaacctcatggaatctttagaacaacatgttatagtggtgcagtagcagagatatgtgaacacgctgtacataaacacaacaagtaattctagatttgactaaaatcttatgtgatctaggttgtgttaatactgtgttctacaacggatacctgttgtagaatagagaagttattaccatcaaaattacataagatcctgaatgaatccagaactatttattgttttaataagccatacacgtgctacaaaattagatgctgcataataaaaagattagattacataagattttgacaaatctagaatttacctattgttttaataagtcccacgtgtattactaatcaccatgattagagaactggggtgcagttctaatctactagtgcacctaaattaatgtaataaattttagggtttgaatcagtcagatcattaatgtaccaatctgaataattgatcgagctccagaaaacatataaaaggacaacgttttctggagataaaagatcatcttccataaccgttttttgtaaataatctatatattgtatataaagataaataaaaaacaagcaataatccttaattctcctatatataacgttcttatatatttgttattgcccttactattcgttcaatagtactgtttaaaaaaaacattggtcctaagtccaaactataacagcacccaggaatttgagctcgcgtggcgtaatggcagcgcgtctgacttctaatcagaagattctgggttcgacccccagcgtgagtgctctcttccctaccttccatccgtgatagtttaatggtcagaatggacgcttgtcgcgtgtcagatcggggttcaattccccgtcgcggagttttttgcatcaatatgtaatattcctgatattactgtttagggttttgtttaaaaaaatgagggtcgacgatatttttctacactttccgttttgcaaaatttcacaaacatacataaaaacaggagtaaccaacataagtacaagagtgcaaccaagaagaacaacaaccaagcaacgaataagaagaaaagaagaaggaaccaaggattacataaatttagatatatagtatataagtgtatactattaggttatcttagattagggatatagatatacagatatataggaatattacatctagagatatagaacgagtctataccttatatctattcaagtgaaatattattgagatttcaacaagattaactgttatcagaaacacataacttcaggattattacagttaggctgtttttgtcacgggagacagaagttgaaatccttgggctaacggatgtttttgtttgggacgttactatatattctctctcttttttttttttttctctttcaccttagatatgatctggtgtgcagtgcttattatagtttaataatgtgcgaaacgtctccaatctttagaatttgggttttatttggcacactgttcttaaaaagttgatagaaataaataaccaggtgaaatactaaacattatacaatctacatataaagtgtaaaagatccgaccacatctacaatagatcataaatctaacatattgtgactctcctactcttcagttatattctttgttactggatctaataaaaggggttcccgacattccaaatctcttaaaatacccatttcaaagttacatcaaccttgaataggtgtaaagcgcataatcataatacataatctttcatataaataaataaataaataaataaatacatacatacatacatacatacatacatatatatatctgcgtgtgtatgttgcttttgtatttcagtatatgtctcaatgtttctatctacagatcaaaataaattcaactttaactttttcttctaagcgttagaatctttgaaaaatgaaaaaagacaagaagtgaaaaattgacattaattgagtgaatgaaaagaaactgaatttcgaaagtttcaccttgtataaagcaaaagaaagtcttagtacaatcataacataccacaaatagctcatcttacataactaattaatttctacttgagcatatatatatatataaatcattttagtaagagaattttatacttttaaactcgtatcattatcattcaagaaaatacaacaagcacaattattttgatcagatattaaaaaatgcctttaattgattcggattcagattcagatgaaggaaaaattaacatctcaggaagaagaaatagaagagacccaaatttcaatgccaaccccaccaaagttaactcgaaccctttgaaacgtgcgagaaataattcagagaatgatgattctattaaatcttcttctaaatcatcagattctaatcaacaaaatcaaaaagatagaaaggttagatatatagctaaaaagaagacatcaaataataataacaacaacaatagcaatgaggtagagggaggtggtggcgataatgttgaaaacaataatctacaaggtgccaatggtggttacgcctgggaagatgaaattaaaagaagttgggatttagttactgtggataaagaaggtgacatgactgccctagtggcgtctataattgaagctagaaaaaaacgtgctgcaaaaagaaatatcactccatttcaacgtggtatcattagaacgttaattttaactcttgattgtagtgaaagtatgaatgaaaaggatttgagaccaaatagacatgccatgatgatccagtatgcaatagattttattcatgaattctttgaccaaaatccaatatcccagatcggtatagtcataatgaaaaacggactagctcatttggttagtcaagtgagtggtaatccacaggatcatatcgacgttttaaaatcactaagaaagcaagaaccaaagggtaatccctctttacagaatgctttagaaatggcaaggggtattttgtcacccgttccaccacattgcacaagagaagtattaattatatttggtagtctgtcaagtactgatcctggtgatatacaccagactattgcatcattagtacatgatagagttagagcaaaagtaattggactatcagctcaagtagccgtatgcaaagaactttgttcattaacaaattttggtgataactcgttttataaaattgtgctagatgaaacccattttaaagaattgtttgatgaagcagttaccccattacccgtcaataaagtaaataaaggctttactctagttaaaatgggatttccaacgagagtgtttgaaaatataccaactttctgttcctgccattcaaaattagtctacggtggttatttttgtccaaattgtcatagtaaagtttgttctttacctactgtctgtccttgctgcgatttaatgctaattttgtccactcatttagctagatcatatcatcatctaatgccattgaaaactttcgaagaagtagattccaaagaaaagtttcccacagaaaattgtttctcttgtcaaaaaaagtttccggttctaatggaccataagaccaacgaattattaactagttcaaggtatagatgccctgattgtaagatcgacttttgcatagattgtgatgtgttcatacatgagatacttcacaactgtcctggatgtgaatcaaaacccactatctaacaatatataataacatctagcatccataaacaaactgtatagatgtaataagaaaaaggaatggtaaataaacaggcatatatacatacatacattttttattctctttaacttcagctataaaaaaaagaacttcatgaagagaggaatttattaatctatcaaattagcttaatataatatttataaatatacatatatatgtatatgtctacttaacaaaaggacgaacctcctttcacttcttatatgtataatttgtactggtttgaggacatattaaagaaaaaaaccatccaattcttcttgattctatcacaccacatctttaaaaatatcgttcagatttaatcaattagctttcgactttttgtggggtgatttcattatgacattctctgtcattctactttgtccttgtttccaactgtcaaaatcaattaatgcttgcatgcacccccattcagtaatcttcttacttaaccaatgcagatttactggtttagtcaaatagtcattacaaccagacactaatgcctttcttttatcttctattgaatttgatgcagtcaaagccacaatgataactggtgcattatgtttccttgatttcttcttttcaagatccctaatttgtttcgcagcatcgatacctgataacacaggtagttgtaaatccatgaaaattaaatgcaaacctccttctttccaaatatcaacagcctctttaccattcttagcaattttataggatatcttatgttttcttaggaatgatcccagaatggcttggttaataacattatcttcaacaactaatacattaatctttgggaaaacctttgcactggtgttgatattctccttctctgaaatatcagtaccattcatattttcatttttcatcatctgtagtggcacagaaaatgtagtagataatggagtagggacagtagatataggatagtatatgcctaaactgtttccgctattatgattaggactattaataataccagcattaccgccagatatatttaataacgtatattgtggttgatatatttcttttgtctgtaatttccctgctccaccttctattagtgatggtccaacttcttgttcacttaagatcctctttgaattattcgcttttagatctttttcctcagactttatcaaatcaattctattgttgttagttccaatagcattactggaagaaggatctatcacatctgtcataaacaatggtctactatcattatacgttgttgataaattgccattatgttcatcaacaaagtcctcattatctatcttaataccaaccttagactgattttcatcatgataattcttctgttgttttgcttgattagaatcatgataatctttaggcaatagcacaaccccttgtcttaaatattcttctgaatttattgaatacatagtttcttgattactctcaggattttcaataacatagttttctttgattgacctactattatcataatccttacttatggtgtcaatttctattttgttaacatcacctgtatctattgactttaatagatcgctagttagtaattcatctgaagaatcgtcaagcattgattgatcaagaacatccattcgtaaattattcttgaaaggttcgttgtgtaagtcctctgtatcaatagttgtaagcacactaatggaatttttacttgagagatgttttgttcctaatgataaatctttattagagaatataagcaatggctctgatacagattgttgtctaccatgaactttaaacagttctgaatatatatctgacattaattgatctggttcaaaaataatcctgctgagatcatcggttacattttgtaagttatatttcaatcttttccttggtgatggataatttctgtataatggagatgaaggtgcactcatatgagtatagtttgaaatataatttctactaattccatcaaacatattagcattatcatatggaatagtcaaaggaggtaaaaatactgatgaattttttttattacaatgtgaactaggaagcaagggtgatccatacattgggggcatatttatatgattaggtaagattatttggggacttggtgtagattctttctgtggtgttgtatccttagtattacacatcttcgaaccatttgccaacgtaatatcattcgaatacgactcgattttgttcagagtagatagttgatctgacaaaggtgccatgttaaaacgcttatatttaatcttgttgtcgatttgatcatcaatccctctttgtggattaatgggtacaggagagtccaattcctgataattgcatttttctctattatatgttccgtgacaatcatctctattccatatgtttttttccatatttctgagttgctttgttttcatatgaccattatcacttttcatcgaattagaatttgaggcctctgtgttatctgcagtatatttccttttttgataaagtccaatggcaattgaagcattatcattttcagatgcccatctggttttattcagtttgttaagtatttttgtcttaaaatcatctattgtatccatttcatcatattcaattagaatagtttcgttgattatatctgaagaataatctattcgacaccaaattttcctgggtgtacccatattaagaggaattccctttgatgaagaggtactaattaatggggaagaatgccttttcatttaattaatcaatgaataaaaaaacaatatgatataatagtctttctttagctttgccacaataaaaaataaaattaaactatcaaggtctgttaaaaattgtattaatatatcaaataaaccaataatctctcaaacgatgagtatatggacctttattggacttctaatggatcaaaaacaatatatatatatatatatatataaatgattattctttgatatacccattcaaaaatatgtttcaactaaaaaaaaaaaaaaagaaaagtcacaaacgccctaacgaacagtaaaatgttctacctcagcagatgctataaaatcagtgatctttaatacaattgtgcgtgcaaaatttagtaactttcttctaacagccccagtctttcttatctatattcttactgtcatcagaacttaaatctttctctctctctataataaatttgaaataagatggatcttctttttcacacaaatttttcaattttagttttttttcccatttttcttaaggccgcgggaccttttttacaaatgcctacgccataaaattactaagcttttagcttaggaatagagagtaataaacatagatttaaactaatcatagactacggaatagtatcatgatgacattgtcaagtcatcaatccggtacatgcaccactgagattattcaactggaaatcaattaatccagatgacaaaagctcaagtgcttatttttatgcacaatacctagggcttggaatatttcaaactgataatttctaaaataattccatatcaccaaagcctggagtagggatgttatattcaccattattgctaagagattcatgtatttgggaaatgtttgttgtatttaacgacctatttatctcattagcagaatccgcttggttcccaaataacccatcccatatggattgtgaagtcacttgatacagtaaatctccaatatccttgtctataatatttgaaggtcttctgtgaaatttagcggttgtttccaatgatgataattctaatcctttctcagaattatctgaagcagtatgttggtatgttaaaggatcaatttcaaccttatgaactccttggggttcctttaataaagcatgattctttgaacttgtaatttgtatttgtgttggaatagcggtttgttgttgtatgtgtgatacactttcctctgtattaaaaaacttatttaatttattcaaatcattaaaaaattgatccaaaggatctgtaaatattgaatttgctgatgtagatcctgttgtatttaaaacatcactggttactacaggagccgaaacacttggacatatttccttggacatacaagtattattcttctcatctatatacactgcctcatgatcttttaaatctataatggatgatttttcactttttctacttctttttaactttttcttactaaacttcgtctttttaattctattagccacacttgaaccataaacattaccaaacttcaattttattactgcagcacataacatcttataagttctataacagtttttagctgcatcacatgtaccaatcaaattcttcaggacatttaataccttctctacataattaataacgtcatcctttgaatcattctcgccaaaatgataataaatgacataaagatatgtcattccagtcatgaatatattatgtgttgccacccatgtataactcatcttcttggtcatacagagcccatcaaaaacatcaattgtaccctttgtactctcttttacaattttaaatgctctttcattcaaaatgggagtctttggggatattccaaataagatagtcttagaataataataattcaaatcaaaaaaaaaagtattaaacttacaattcattgtgtcaaaggattttggaacttcactcttataccaatgattcaactcctctaatacacattctttccaattatctaaatcagaatattttctaggtaattctgaccttggcgcatataaaatcttcacaatatttccctgtatcttccttattttatacattgcattagcaatcaccttggatgacacagtagaacttaaattatcagaatagtccattgaattatctaatattggaacaatgttagaatcatccaaaagacttgggaaacgtgtggtaatactctcctcaggaattccaaagggtctaccaaaatatgaacatatttgtctatctaaagaataagcacaccagaataaccttcttcgtatttctctttgaaatggattataactttgattcagtttttcatcatgtaaccccaaatccacagtcaatcttagaacagatcccataacgtaccaaactccaggtgaactaggtctcattaaagaatataacacaattaatagcgtcccagccaaggtttctaacttatcagtactattaaaaagagctgatctaaagtataatgcccttctcttgaaagtaacaagggtcgtgatatttgattctaggactcgagtggcatgaccaatagaaaacacagcatttaaaaaaaataaaggtattttgaatcttgaaggaacggatatattattgtccttacgcatattattttgctgtaatctcccaagtgtatcaaaccaaggtattgtcaaatcaatatcataatccattttttcatccggtgctacatatatatcagcaggcaatttaaaatccgtgtttattctagtgtgctctgatattaatgagatattagtattccataacccataaataggttcaaaatatttttttaaaaaatattcacgatgaaatataggtaattgagaatttgtatctgtaaaaaatttaacaaccaaatcctctgcttccttctttaaaggcaaccataacggatcaaaattatcagttgtatctgcaattctataatatttcaattctgcctctcttctttcaatatcgatatctaaatcatcattaataatctcaggcgaaaaactggctgctgcaaataccaatttagcaaaaggaataccagaagaatcacctaaaaaagagcctgtagagttcgaattaatatcttgaaattgtcccatatccttacctggttgcaaaatatcaaattgtggactatttgtatttaatactgacgtggggcttgtgtcaggaaacttatcactattattatcattattatcattattattattattattattattattattattattattattattattattattattattattattattattattattattattattattattattattatttattccatcagtcttattaccatcaccactactaccattatcattagatgcagtatatgaagtagaaatatttcttttgaattcttgaactggttttatttttgaatttaaatcagataccgtagatttacccttcaacatttcacctctttgaattaaataatttcccaatattatatttaatgggtaatccccactattcatttccttatcataatcaggatcatatggtttatcagtgtccacagaaggaatattattccgtatagatgaaatatcaacaccacattctctcaacttctttgccattacagcaacacggctttccagaaacaacaggtaggaacgaggcacatcttcgccagtgacaggatccaaggaaacacatggttcatttgctttcgaacagtttctgcaactgggaaactcttgatcacacttgatcttctttgaacgacatcttttgcatgctgatttaatcttggtggttgaatcagtaactttccgctttctgctttcatttttttttacttgacttatcatgtaaaaccaatttaacttgctaacctttctttttttataataaattactgaaaaaaactagcttctgtatccaagaccactataatggcaatgacactcctcacttttaattgatcccctgtatggtagaatagaatcgtccacctacttgccactagtcatccttctcttcagcaacagccataaaagatcttttataaacaaattcttttcttcgtgataagatgctgctgcttttgttgccgctaccatggaacttaagtgaacaaaacaccctgcttattctcaaaaaataaaagccaaaaaaaaataaaaaaagaaagacctgcataaaataatttaagaccaaaaacacgatgtcaaaagggtcatcgaaggaaaaacgtatataataataacactttaagtaagatatctaggacagaggtacatacttctgtgtaagttccaaatcacctctattgatttatttgcagttcttaatgataccaaaaaatcctttaaaaccgggggtcatcccttaccaggatgatgattttaggatagaaaacaattctgcaagaccaagactacctcatttcatctcaacctctgacaatttttataaacctgtggatatcccaatcaataagagaaatttcatatattgtccctgtgctccaaatccactttttcctcaattaggatattgtactacagagtatcccttcgaatcatcaggttttaatttgatggatcgatctgctgggatctctattaaggataaattaaataagaccgtttcggttggtcccactatgggttggcggaccagtagatcagatgtatgtattaaggaaggtgctgcttattgggaagtagaggtagttaaaggtggtactacagtgcctgtaccttctgataataacattttgaaaaaagacaccattgattgcagtcctcacttgagatttggtgtcagtagaagggaagctagcttggaaggacctgtaggatttgacgtatacggctatggcatccgtgaccaaggtttagaatccttccatgagggaaagttgcggaaagttttaaactcggatcagtaccagttgaaacaaggtgatgttttaagttttatattatatcttcctcaattaaacgtgcaagtaaatcaagctaaagaatataccattcaaagaatcaatgcattgaaaaatgcatccaaatcaatgaaaacacatcgcacatcgactacagaacaatggaatagccataacaatagtgaggaacctgctaccaagaaaagacaaaaaataaataaaaacacggatttccacttagctctattagaagatattaaatataatgatataataagagaccatattgctattagatataagaatcaattatttttcgaagctacagattatattaaaactacaaaaccagaatattattcatcagataaaagagaaagactggattattaccgtttggatgaatctttcttggctgtttattgtaatggaaaatatctaggtaaagcatttcaagatttagacccatttttaccaccattcagtgaattacagtataatgaaaaattttattcaggatattggcgtaatggtgaatatatagaagaatataataacaattcaaatcaaacagattcagaagatatgtaccaacgatcctcgaaaaacaaaaattcaaatttgcatggccataaaaagggactgctactacgtaacaaatatgtcaataataatagattgggatattatcctactgtaagttgttttaatggcggagaagctaatataataacagaacgagaaaagttaaaatattttgatgttattacacctccagaacctttagatattaaagatatcaagactctaaatacactttttatggaacaagtagctgatgatattgtatgggatattattgatgaagttgaagaggaaataaatagcaagaaaacttttagcatttatgatttcaaacaaaatggtagcgtgaagaatgagaatgatagtgatcttcataatgtttaatcacatgtatggaatgtttagactttataatataccttccctgtttattgaatcacaaaataaactactaataaaatcagttcaaaaataaaaaaagtgtctttgttaataattttggttcctccatctacagtatataaatatataattacttatatcatttaatatccaatgtagtaaggttatgatcactattgagttcaaatggcgtctttggtgtcaactccaatgacatattaatagaactatcgttactaacatctttaccaatgattttattctccccattttcctgggttacggtcatatcatcattatcatccttgataatactcaacttttcactccattccatcaattgaaaaattaaccccatattgggactaatatccttagcaattgatttcaatttattataagcatcattgagattcatattacaatatcgcatgatatatgcaaccattagtgaagcggatctagaaacgccacattggcaatgtattaaaatttttttattttgaagtgctgccttatgcataagatctgttaatttgttcaaatccttcactatttttgaatgatgagaccactctacgtggtaatactctattttcccataaaactctggtgggatcctatactgtaaactagggacctcttcagcaacattaataatcagatcaaaattcaaaatttcatttaaactaggttcagaatataaatatatactaggtggaataaccaagagtggtccattaggatatgcatttttaacatcaacattttcgtatactggtgtatctacattattgtggctcttactagttgaatctgaatttgctgttacagtacaaggtgctttattagtagcatctggaaacatccatgtagtatttcttgccttttggtttgattgtatgatttgttgatttgactgtgactgtgtttcaataatacttaagttatctttagataatggtgtagaagtatcaatagtccgagacctacctctgggacaagtatttagaaattgtgtatttattgaaagtgtggcagaattgtatttaggtaagtgtatagggttaatgttatgcattttagaagttggagaaatgaaatgattaatacttgatttctgtataccagatgtaccattaagcgatctcgctaatgaagcagaatataaagatgcctcacttcttcttattagtaaagatggtcttgttgctatctgtatatgtgccccagtagaatttatgggggtcgctatatttttacaattatcattcgtagttacaatattctttcctgttattgttgtccctattaaattgtcatcatccttagtttttatagatattgatagattctttgtattcttactttgtaataacctgatgtgtgattctcccacactcgcttgtaatgagacttgctgtggatgatcattcataataataataaagtattcaatcttttttttgtaaagaaattataaattagttaatgtgcaataaaatagcaaataccactgttaaaaagttaattgctacttgtatgtttaaatgaaaaaaaaaaataagagaggaatgttcacttccctttattcgaaacactttagaaaaatatcaatgcaaaatatgtgtgagttacttgaaagtgaatattctaaaaacaaaaactgaaaagcacgtaattttttaatagatgtgactgcaggttgaacaaaccacatatagtttaaaattaaccgctagtattcaaacagttttgacaatgttgaacctttagaagtaacttgactataaactgctttcagccatcttcatcacttatcgattaatgtattaaaagtttaattactttaaattttatcaaaaccaaatatccaaattaggagaaaactatccatttttggaaacaaactactatatttgaatacaatagcaatatcctaaaaaaaaaacaataaacaatctaacactaaaaatagccatctaaatacaatgcttctaaatacacaaatgtatcatacgatgaatatataacatatgcagtaattggatgacactgtttaaaactaatttggtatttgaattgtaggtcaaactaatatactgttaacttccccttagaatccctacctctcaataacaccacatatttcttttttaacaaaaaaattaatatataactatattattatgcacactctggagtatataactaacacttctagtacaaacacattattttataaaatatttgttattagtgtagaaatgtattcattttccacctcatttttatgtcctgatactgttgcagagtgttgaacattgattgaacgtgaattcccaaaaaatgggatagaatatttcattgtacctcgaaggaccaactcataatcatttttaatcacttttctccatttcatattgtcactagtggatgagttaccgggtgaaacaacttttagcgccgttgtagatgcagcataccgcctattgaaaaaaccaccagcaaatcttaaaggtatctccatttcatcaattgatcccaaaaataatgcctctgttttcaaaacaagcttacttttagcaaatacatcaacatccaaggaatttacagttattgtgaaaaacccaggattgaaagaagaaactgtgatatcaaatattagttcttcagcactagatatgacgttgtccaataagacaatatcgaaatcttgcaaatctttatttgtagccaggacaaacccaaacaaaaatccaataaacaagagcaacagcatcaatacaatatagtacaatccatttttaaaccttgtcaatctggatttctttgtattgaaatcatgaggcgaaaaatttaattggtttcttgacattttttttcttgcagaatatcttaatggagtgtattcgttaggatagccatattcataatggctgttatttctattgatgcaattaccttgaagattaatctttttattattattgttgctatttttgccatagtataatatttgaccctgattaacatttggatgtaattcataatattctggttcactacataagccatagtcaccagctggatccatatcatcatcttcatagtctgaaatttctggtcttgcttccaaatcggatctatgattataatagaatgtagaacgtgcatcatcatcaacgttattcacatgaataccatccttgtaaaattgactagcattttcaatgcctaagttattaccgatattattaaaatcagaattcttaattatactattcttttttatgacatattcactagtgccattattattattagcattattaatagagttactacaaccctcattttcatcttcctctttgatagcactggtagaatggtgatataaccctggcgatatattccaattcattgagttatggctctctaaagacaacctcttggaatcactaactttctccttactcccttccttatttgaattataatattccatatgtttgccgttattatatttattcaaagtttgatgttttatgcccatatcatacttcatactgtcagccccattcaagtcatcttcctgttcaatataatcttctaaattaacattatcaggtacaccagaataacgtcttaagggagtcccagtactatcaaaaatcttagacactgtagttctcaacactcttttattctcatgatttttcattagggtattgtggctactatcattcccagccttaatagaattactatttttaatcattgattgtttctgtaaagaaccactaggtagatttgaaatatttcccggaggtaaccttgttaatgatactgtgcttaatcttttatcaggagatctactttgaaattgttcaataccaaaagatttcattgactgccaatcgttatgtttatccatattatgaactgaccgaacactcgggatatcatccacatttgtagtaatataaccttgatttaatgaataaatactgttagcagtattaatgttgttatctgctttaggattattgtttgtaccagctttattgaaaatattactatcatcattatcaccatgattcttctttttattacttatggctgaatctactgtactattgggatgaaaggttgtaacgttaccaggattgatatttgtgttaagactagacgtgacatttggcatattgcttgatttataaccttgtgcaaaatgtgatatccctgatgaagaccccataggatcatgcacagttgaatgatttagaatcccacttgtactcgtatgtctaatatttttcaacctattaattaattttttattcgtattaagtaatggtacactcatcttagttgatattccacgatttttattattgatcgaaccgtccttaacatcataagaatgagatgttgatctatgatcatttatttgcatacttagagggcccatactactgttactcggatgaattaaattctttacagagtttgctgctgattcatacacgaatgtctcttcagaatcactaatttcattctcacctacagctgaagctagcctagctgcaaagaattctgttttatttggtttttgattattattattattattattattattattatcgtcatctgtctcatctgtgttgattatagatagatcatcaccgttgacttttttatcaaagtcttgattttcacctagtttaatattactatcttttggtattcttggttcatttacaatattcctatctatagagattcttctattgctactactacttccactacttttactattactattattattactattattactattgttattactattattactattgttattattattattagtatcagtattggtagcagtagtgacaatattattattaatatcataaatgttatttccagttctgttgttttgatcattaagaacacttccaatatctttattattgtcattatcattaatattattactattattatcgttgttattattgatattcttatcagtttgatctgtatcatttggattaactaagatttcatttatctttttattatctgttaataataaatctcttgaatttgcagtcggcattataggcctttcaataattttgctaacaggtctcggatcaattgatttatcaaagttaagtttatctctattatctgaaccattattatctaacattttacttgtagtatttatcatattctcaggtaaaatacccacttctccaggagtattattattattattgttattaatattattagaaatagatagattttctatcatggttgtagtaatagacggtataccgacaatattatcattatcattatcattatcattatcattatcattatcattgttattatcattgttattattataaatttctatgctattattattattatggttatcagaacttatattagacggaagaggaaaagcaagaggagaagaagaagaagaaaaaggagacgacgacagtccttttgatatattaataacgttttcatccttcggtattaatgatggtccattattataatttagatttgatattaaaatagagtcattcttcaaagaagtatcactattattattattattattattattattattattattattattattattattattattattatcatcatcatcatcatcatcatcaccaccatcattactgtcattattattatttacatgatcaatttgttcatttccgtttattacaatatttaacacattatctgtagtagaagtagatgatatgatatttgtagattctgtattaactgtttctgcctctacaatgaaactatttttcttagaatctaatttggtatctcttttaatattatttgagtctgaagattcatttaaagaattatgatttcgttgttttatggataatcccatcactcttttttgtattattatgtagtaaataaaatagaatgcaatgtcaaaagagaaagagagaaagagagaaatagagggatcaaaaaatttattataatataatacaaatttggataaattatatgttgaatagtatttcaatattctattactacagctattttgcgtataaaagatagatactttatagattaggatagtttaatttcataaagatacatgcctatattgttcacattttctcctacccacttatttaatgtattccattctattttattttttttgatcacatcagaaagtctaaagatgaacaatcaacagtttatttaaaagaaaagacaagccaagcaaaaaaaaaaaaaaaaacaaaaaaaaaaataaaaagagataaattagatcaaagtaaaaataaagcttaaaccctagaaataaagattagggtaaactacaccattcgtccaagatatcgcaataattagtgacacaccttagggttcgtccacacaattttccttaacttccgatatattccgccttctttttttttcccttttacaaaatcatagaccaaacaaaacgaaacaataaataaattcaacaaaaacatgggaagggggggaggagttcattaagatttgttcctttttttgatatccttccggcttttctatttttccttcatttgtccctcatgtgcttctctctttatttagagtcttctgtatgattacagagaatcttaagatattttgtctgttaacattggttccttcctcttctccccaccatctttatccctttctaccaatgaaaaattgttcaattcaattcaattcttttctttatgggaaaatgcattatttttctcgaatgaaagaaaaaggaaaagagaaacggacaaatagttgtcatgattattttctatctaccatatctccatatctaggtgtaaactgcataatgtaacagtcgtcgttggatacaagttagctctgtggcagaagatcttgaatcttgaattttgaatcttgaaatcttaaatcatgacatcctggattaatggaaacaaggggcggtggagaaccaatgttttgatgacaattcattctcgaataaaattggatgtacacacgcatatttgtatacgtatatatatatgcgagttagttcgatcgtaatacttggcactcctgcttttacctgcttgttatccttgttacttcgcgagagaccagatctcctttgctagctctctccatttttttcttccaattttctatcggtttttgcgtaacggtccttttccactttgttttcattgttgcagttagacctcctttttccctccccttgcaaaataatcaacaacctgtactctattttctctttttatacacaaaagtgtgcataactatcttcttctgtatacattacgtatatactcgcacactcatagacaaacacatctatctgtctgtatatatatatatatattcctaatataacataacgtaaaaaccacatcgagataaatattcgaaactgaaattaaaaactaaaaaataacaacaacatgtccaagaaatctgctccacaacctttcttctctgatattttcaaggaaactaatgatttattaaataaggacttctatcatctaagtccattgtgtttagacgttcaaactgcagctaaaaacggtgtcactttcaatgttaaagccaaacaagctactccacaaggtgcattaaccaccaatttggagaccaaggtcagtgacttgaagaatggtttggtcttaacccagggctggactagtgacaataaattaaacactaagttgcaattagaccaaatcaccccaggtttaaacactgaactaaacactactttcaacccaagcaaaattttccaaactgcttccactgaagatgaaacctctgtcaagaaatgctgtgtcggtggcgaagtcgccaacttaaacgttaagtttgtccaaccttatttcagtgcccgtggtgtattcaattttgttcgcggcggtgttcctaaattcttaggcgatttcactacttcctatgaaaatttcatcatcggtactcaaatcggttacaacatctctcacggttctatctctacctacgccatggctatggcttataaacaagctgactactctctaggcttacaaatcgatgaccaaagagtggcttccgtatccttcagtcaacaagttagcaatcaattatccctgggttctcgtgcaatcttgaacccccaaattaatgacaagaaagttaatttagaattcgtcacccaatatgtcccagataaagatactcaaattaaagctaagatctctgatttaggtgtcttgtctcttggctacaaacaattgttaagaccaggtatcactttaggtgttggtacttccttcgatgctatgaaattgaatgaacctgttcacaaggttggttggtcgttatctttcaacctatgaatttatatatatgcgatccatctttttttcttttttcttttttttccccgttcttttaacgcttatgtgtatctaaaatgtatatcttttatttttatttatttatttacttacttatctattcctattcttgtgagtatcactctacatacgtataaacccaggtaatctgtctttatttacaatcagattggtttcaaacatcgttataaactccaaatctgtttcctccttcattccaccggaaaatataccgtattcttgatatatcccggctatcgaccaaccttgaaataacttccttattatccccactacgactccaacacgatgcttccccttattagaatgaatcaagatcggataattttcaacattcaatattatttctaggatcgtatccagcttttcttgtacatcgtcatctttgcaagatttcatctgcacacttataaaatttattgcttggccctttaaaaattcggagtattctgcagatgtgtcttccttatcaccaatatatattattgtccgtaagtttaatcgatccttaataaaagaatagtttattggcattggataccctgatctgtacaacgacacatctgttgagattaccggtgaaaaatttaatggaggtatataatgcttattgttcatgttgttatataaaatagaatatagactataaaactattggaaatagaatagaatcagattggaaaataggtggtttgttttaatgctgtcttgaaataataatcacaaatccaatctctcctaataaaatgctcttcttgtccttgcccttgtccgtgttcctttgtttttgatatatttgcaattttctatatctctagtatggatttcagtgtctaatgaaatcttactgttaatatctgtactactatgttaaagagatgggacgcaataaactagggttgtttgtttcagctatccacctcattgcgcttcccatcaaacgtacaccactaccataatgattactttccttgatttcttttttattttttttttgtcgaagtttccaggctcgagccttttttgggaaagtttgttcctctcatcctgcaatatgttttcctgattaggtaacattgcccgatcaggcaagtatgtcaataaaataaaatgaaataaattaaattagaaaaaaaaaaaagaataataacaatgaaaaaaaaataatttccccttggatattgaatattaagagaattgaaataatactaataaagtgatattaacggtaagtgggttgttatttagcagtgctacaactattgtcaaacggatggctaattaaataccaaggtattgctataataattatcataattatctttaaatccgagtagacaggactcctctcgacattcttcatctgaacactcaaataacaatatatagtgcaggattatttatcattacattaagtgaatcctattacaaatggaagaaataccttttttaaaaagaagtttgccaagtttaataacagcaaccacatcaactacaacaactgctaccagtagcagcgatagtagtaacagtagaaatagcgacagtagcagtaataccattactaggacaagtattatcacaaacagttctgttgatgattcaatgaaaacttcgaatactcctgtctcaacatcaacaatatatgtagcagctataactccacctgctgcagataacaacccatttatttatcacacaggatcaacgccagatggcactgtgtttattgcaatgggttgtattgtaggtgcaatatttttcatcatcttcgcatggtggtgtttaactacctacatatcatacaaaaacactaaagaagcaaacaaattgttgaaccataacgctctttactattcaatagaaaagcaaccgttaactaatggaaaaaacaatagaaaaaataatgttgatatcaatgctaataggattccatctgattcgtcgtcatttggcaaaatgagttgtgaagattatgaattcgaagaaaaatatctgaatcgatttaatgatttagaatttggtctaaaccaagacactacaacaaataccttaaatcaacaccattatcatcaacctcaacaacagcagcagccatttagtgtgattcaatcggatatgagttgtagaaattcactatttatatcaccaacattacaattatcccaaaggacagaggatatgtatcaaacacccacaaaaaatacagaagccaattctgagatcgtattagataaacctactttgactgcttcaccagaaagaatgaacagacacatgagaaataagcacagacggaatcagtcgtcattaggtagattatcggcatcaccatccaaatcacagattgaattatctaatcaacatcataagtccgcttcaatgtatctggaagatatattaaactccaataagtaaataaacaaacaaatgcacacacacatatatatgtatatagttaccaactattttaacaatcaaatttactcctaattattgtctttcacatacatattatctatatattctatatcctcttaaataatttaaacagaatatatatatgtatacgactatcaagtggaaggggagtatgaagccttaaactcacctcattctctaatacccgtcatagttcctttctactgggccctttatctcacatactgtagatacttctaaaattattgtatataatttactagtttaaataaattatttttattctagaaaaaaaaaacaataataaatataaagatagataaaaagtactttattgaaagagatatatataccttgaaaaaccatcttgacgacttatatctactttgccataaaccaataatacctgccctgtaagtaaagttatatcaaaaaggtgaaatacacattaaaaccaccattcttcaaacattttctactacaagaaatatgtcaagagattcttcattgccacttttaaaaatatatactgtggaggatctcccattgaacactgatcctgaaccttttatagatgttggtgaatatgatattaatagacctatagctatagattttggttcatacaatgttaaagccggttatactggtctatctgatccaaacttagtatttcctacaagattaaccagacatcgtgacaggaaagtagcaaagacattcacttttattggtaataatactcgattagatcagactgtaagatctcaatcaaaaacgccctttgatggtagtattatcaccaactgggattatgtggaagatataatggaatatacgtttcatcatcttggcgtgaaaccaaataatggagtacagaaccctttgattataaatgaaagacttgcatgtttacaatcacaaagacagaactggtatcagattctctttgagactttcaatttacctaaagttgcatttggtatagactctttattttcattttactataacacacaagctagcaataaatcaaatggagttgtgattaattgcagtcatgaagaaaccgacattatacctattgtggaaagtcaaccaattttgggtgaatgtaaaagaataaattggggtggtagacattctgtggaatttttaagtgatattttaactttaaaatatccatactttccatcaaaattgtcctcgtttcaatatgaatacatgtatcataatttttgttacacttcaagcaattattcaaaggagcttgaaaatttgttgtcattagatgtattggaagataaaaatattgttattgaagtaccattcactgagattttacaaccaaaaaagtctgaggaagaacttaaacgacaagctgagaagaggaaagagactggtaaaagattacaagagcaagctaaacaaagaaggatggaaagactggtacaaaaaactgaagaatatgaatatttttctcatgttagagagcaattaattggacaacccaagaaaactgttctttccgttttgcaaaatgctgggtttgatgatgaagctgacttcaaaaaatatatgtataacctggaaaaatcattgaaaagagctcagttattagaagctgatgaacatgatgataataataatgatggtgatgacgataataatcaaaataaatttgatcttattgatatacccgatagcgaattaacagaagatcagattaaagagaaaagaaaacaaagatttcttaaagctagttatgatgcaagacagaaggctaaagaggagaaagctcgaatagcaaaactggaggaagaggctaggattaaagatcaagaatggcgtgagactaatctaaacagctggattaaagataaaagaaataaactaaatgctcttattaagaaaagaaaagataaattaaaattaagagatgaaatgaaagatcgtaaatcacaagttgcacaaaagaggatgcaaaatttagcaaacttagctgaggatagccctcgttctaaaagaaatagacatcaggcatcaattgataatgacccaaatgatacctttggtgcaaatgatgaagactgggatgtttataatgacatcacacaaaatcctgaagcttttgatgagttattagaggaagaatataaggagatagttgaattagaaggcaagctattagaatacgatcctaattttacagaagaagatacactggatgcccaatacgattggaggaattcagtttaccatttatttttgagaggtccaagaccgcatgatagtgaggacccacaccagcaacatcaaatgcatcttaatgtggaacgtattagagttccagaaattttatttgagcctactattggtggacaggatcaagcaggtatagcagagttgtgtgaaactatggttaccaagaaatttggttcaaaaccttcacagttaagtgaaactgccttacagatgtgtaaaaatgtttggctaacaggtgggaattcccaaatcccaaatctaagacaaagaattgtaaatgaattcacaagttttctaccctcaggtacaccaatcggtgtttatataagcaaaaacccgtcattagattcatggagaggtatgtcaaaatttgctcaagacgaaaagcttttgaatgaggcaatgatcacaagaaaagaatacgaagaatatggtcctgattatatcaaagaacataaactaggtaattgcaagtacttcgagtagactttatttatagatgcataaatatttttggtatatatcgcgtgatttaagaagtgaactgatgtacccattcaattttatatgtattttaaaaacatttttaagttaatatacagtgaataataaaaattatatatatatatgtgtgtatgtgtgagctgaccatttttatcatacttataaattacctatttcttagcatttggatttttaccttttttcaataagtttattttcttagatttatcaatgtatttagcatcttcttcatcatcgaacttggcaaaatcagaatgaatgataccttcctcagcagcttctaatctagcagccatttctttttctcttggagaagcttggttatcgtcatgtggagatggaccaatcttttgaaatttagcaacaaagaaaccatcaacattatatgtatgtggataatatcttctggttaatttaacacttggatgaaattttttacctctataattagtgaacccttctttaccaatgactaaaccagtgtcaactaacttgacattgggtctctttcttaatgcataatcaacaactgcttcatcttcttccacagcaacagaacatgtagaatatacaatcacaccacctttctttgaattacagtccacagaatcaatagcagaaagaagcaattgtttttgtaaatgtggaatttgaatgaaatctttttcagtacgtgacaccttaacagattgatccttaccaataacaccagtacctgaacatggtgcatctaacaaaattctgtcaaatccaccaataacttttggaaattcacgggcgtcatagttacaaacaatagtatttgtacaaccaagacgatgaatattagcaatcaaagattttgttctatttttgtttgcatcattagcaaacacacaaccagtgtttttcattaaagcagaaatataggttgtcttaccacctggtgcagctgccatatcaagaatacgttcattttcttgaggatctaatgcgatgacgggaagaaaggaggaagcagcttgtaatatatagtgacctgccaaatattcaggtgtagcaccaattgggacttgggaatcaaaaatttgtaaaccaactttagtccaattaccaataggttgtaaattaacacctttattaaccaaagcttgtgctaaatctcttcttctagtcttcaaagtattggttctaatagtaattggtctagccacttcattagcttcaaaaaattctaaggcttcagaaggagagaaaagattgaataatttttcagccaacattggtgtataaccaaaatattcgcaaatatctttcaataatctgtcaacatattcagtcctcgatctgccttctgctgctaaatgtttgaaatcttctaacactttaacaatttcaataatacgagttcttatagctgttaagtctggaggttgaccagctaaggctgcttcttcttcttcggttggtaatacatcagctcttggttgaatttgttgagcttctaacaattcagccgctgcctcttctgcctcttctgcttcttcctcatccaactttttagaaagatattccatatttgctgcatttagttcttccaattcatcctcgtcatgatcttcatcatcggagaacattggtttgacatgcacatcatcgtcttcgtcattttcatactcttgttctaagtcaaattcagcttgtaagtcctcatcttgaaattcatcagcctcatcttcaacactttcatcatcatcaaataaagattttttagcattagataattcttctaaatcgacttctggtaaatcatcttccttatcttcaggtttttcttctcttttaggttttttaacagattttttattgcttttatctagatcatcttgagctggacgactatttttcttcttttgcttttgcaattctctctcttcctgtcttttaagttttctttcctttttagcttgaaactcttcaaaggatggtggatcaacctgcttatttttgtgacgtctggaacccattgtttattttatttcgataattgtgttttttgttgctatccagtttgttaaatccagatatatctcagtaatatgttggaaaagttataaaactattttttcaacaatagataaggtaacatccttaatattattagttattaatttgagatgagatgaggataagagaaatagttcaaaattttcgtttttttgaatttagtgaaaaatttaggaaaaaaagaaaaaacttttccatcattgcaaacggaagataaagcaaataattagtatacagaaactgataggcattaaagcccattgaagaggagttagcgaacctcgaaatatctgcacatattgactctaaaaagcttccacaaattttacctttgaattagagttggttaagggtcaatactaccattacataaaaagcgtgtggttggtacaggttttcacaaaaaataaaataaaataaaataagaattagaagaacaagaacaaaaagaagaattgttttatgatggaccctcaaaagcatatatgttggaatcagcatgtgctgataactttaccatctgagaaatcgaagattacagagttaagaccagatggaactgtatccttgggcaaatttggtgctttccgtgttaatgatgtggttggttttccattaggtactaaatttgagatattttacgatgaagagacagataaatggaatgaaatgcagaaacagaaaaatggaggtaaggagaaaaatcgtataccagtaggaaaagtgagggtgttaactcaaggaagggataatccagctgaatactgttctgagttgaatgagggcgtagaagagaacagactaaatagtgattctttaaatgtcactgcttttactacaggtagtagtgaatctaacagaaatttaattgatagagggcatgatgttcaaaagttgagtgcagaagatatcgaacaattaaaacaaaaaagtgttacaagccaagaaattattagtcagatgattaaatcccatggttcctttgataaaaagactgtcttttcgcaggagaagtacttacaacgtaagcaacggaaatttgataagatttttactgtcaattacttgagtggttctgcattattgcaatacttgatcgataaaaatgatattcaacgtatcatggatatttcagaagaatcaatgggtatgatcctgaatttagccaatatcagatccactggaacatatctatgtatggatgaaactggtggattattagtttattttataatggaaaggatgtttggaaatggtgctgaaaatgttgatccaagtgtgggtaagattgtagtgttacatgaaaacgaacatgttaaccttgaccttttaaaattttccaattattcagaggatttcattagtaagcatgttattacaatacctctattggacttttttgaacctttaacaagagaagagattgaatctcgttttacaccgttacctaaggaggaggtatacgaattgaaggctagtaagaaaaattcatattatcgaaaattaaaatggcaaaagacacaattagaactattaaaatatattaatgatgttcaatacgacgggatgatccttggtaccacattacatttgcctgatctggttaaaagattaggagatcacatccatggatctagacctattgtctgttatagtcagtttaaagaagttttacttgaattatctcattctttgtataatgatttaagattcttagcaccaacaattcttgagactcgttgccgtccttatcaaacaatacgaggtaaactacatccagtgatgacgatgagaggtggtggtggctatataatgacctgtatcaaagttatccctgtttcaccatccatggttgagggtgctaaaatattaacacatgtggaaagttaattaggaatactaaaattgtacattttctttatttatttttttttttttgcaaaagaaagtcatctattagagaaaaggaagaaacaaagatccaattgaatactgcagatgcattaccacaatatgattctctagtgaaaatgaagaaatagataaacatgcttattaatatatttattgtataattatttgttgtccataatcttgaaatataggtttcattttggtagtatatccataaacgcatcgtagcttaccgttagagtcaaacttaatccctaaggaccatttttcatttgaagacttttgattccatttggataattcttctttaacataaagatattgtttataagaccccaattcatatacaaaggaatttatatggggtaaccatagcagtatcaaattttgataaaattctaaatcaccaattaatgccaaatggggttcataatttttcacagagtcatctacatcatttctgaatgattccttagatacatatggtggattacaagtcaaaatgtctattttctccccctttgataatatttgtgaaactgtgttggattcgagaatgtcaccataagaaacttggaaaattgaactattttgtaagttgttatgtctaagattacgctttgtcaagttcaaagcatagggagatacatcaattgcatctatacttctgaaagtatttttattaatagccatcttcatcaacaaaagtgggatacaaccagatcctgtgcaaaaatctaccaatttcaaattggacaaatgcggttgtgacaaaatgcatttagccaattcaaagagccattcttctgtttcccaacgtggaattaaaacatggggtctacacaagattttcaaaggaccaaaaggctgccatccaattaaatattgtagtggtacacctttacatttccacttatataatcgtatgaactgcgagataatattaggatatactctggtgactagtttactttgttgtaccctcgaccttctactgtgacaactttcccataaccattgtacctctctcttaacactggtatctttatatagcctttctcctatttgcttgagtaaactcttggttggtactctaggcatcaggaagaaactaataataaataatactaataatactaataataataaaaggaaacaaatatatagaattcaactgagcacacttactaaattgtctaatcacagatttaatagacctttgccaacatacttatcattattaaaatctacgaatcgttaccgatatgaaatgggcggctaattccatttaattcctggaggaagggggggaacaaccttttcaattttgctgtgaaatattcttctttattttttaatttttgtctctttggtcaattaccagaaacaaaaaaacaaaataataataataataataataatgcagtgtgatagcgccaaggaagtttgcatcacgtgaccttccaaagtaaatttgaaaaaaaaaagaaattttttgggaggaaaaaaaaaaaaagaaaaaaatttttttttgttctttgactttctttatgtttcgatgagtttgaagaaattagaaatataagtaaatataaaaaataaaaaataaaaaataagcaattattaaggtgtgaaatctaacatacatatatacatacatacacacacacatatatatatacatagatagattggtgcgctgtttttgttagttcaggattgatacagttccttttagaaaacatatctgtgcaattgtattaaaaagctaaaatatcaggaatatttgtttaggatagaaaaaaaataaaataaaataaaccaaaaaaagaataataaaaagaaaattataaatatctatataaaatggttgctgaaacaaaattatacgatgttcttggtgtctctccaaatgccacagacagtgaaattaaaaaagcatacagaaaattagctttgaaataccatccagataagaatccatcagaagaagcggctgaaaaattcaaggaagcctcctccgcctacgaagtgttatctgatccagaaaagagagacctatatgatcaatttggttcccaaggtttgaatggtggtgccggtggtatgggtggtggttttggctttggtgaagatattttctctcaattctttggtggtgctggtgctcaaagaactcgtggtccacaacgtggtcgtgatattaggcatgaaatcaaagttactttagaagagttgtataagggtaagacatccaaattggcattgaacaagcaaattctttgtaaaacctgtgaaggtcgtggaggtaagaaaggtgctgtcaagaaatgttcttcttgtaatggtcaaggtatcaagttcgtcaccagacaaatgggtccaatgattcaaagattccaaaccgagtgtgatgtttgtcatggttctggtgacatcatcaatgaaaaggataagtgtaaaacatgtaatggtaagaaagttgatcacgaaagaaagatcttggaagttcacgttaatccaggtatgagaaatggagaaaaagttgtctttaaaggtgaagccgatcaagcaccagatgttatcccaggtgatgttgtctttgttattcatgaattacctcacaaattattccagagatctggggataacttgatttatcacgctgagatcgatttattaactgctcttgctggtggctcattcatgattcctcatgtctctggtgattggttaaaggttgatatcgttgctggtgaagtcattgcaccagactcccataaagtcatcgatggtaaaggtatgccaatacctaaatatggtggtttcggtaacttaatcatcaaatttagcgttaaattcccaggtaaccatttcacagatgaggacacattaaagaaattagaagatatcttgccaaagagacccgagttgccaaaggttccagccgacgtacatgttgaagaatgtgttctatctgaatatgattcaagtaaatatgaaagccgtggtagtggccgcgcaggtcaaagctatgattcagatgacgaaggccatgcccatggaggtgaaggtgttcaatgtgcttctcaataagtaagtattaaaagaaaaaagaaaaaatatgaggagggaagaaaatatatatatatattaataaaaaaaatgtatctgtgtatattaaaccaaattttttttatttaagtagatattataaaatttgataaactgaattataactaaaaaaaaaattgaataatcatgagaggtattctcaaactttatgagtttgtatatattattattaataattaattaattaatgaattgattgaagtctattatatgaaacgtaatagtacatatgcaaataagtaaaaatagtgcatgaaataaaaaatagatcataaataaataagatagatgggtgttgaatagacaccaaaaaaaaaaaaaatagaaatgcaaatgaaaagagtcatgaagattaatgttggcaaatagacaaaagaatgtgaagaagggttggacttatttcttttcgtaaactacctcaacagaaagctcctccttttcttgttgtttcaattcttcacgacgttgtctctttgctctccattgcatcccatacatcattggaataaaagtaaggaaattggcacataataataatgcagttaaaaatgagaaagtaccaccaacagtcattgattgcttcattttagcaaaacaacccatgaagatagtagatagagaacatctaacgaagttgaaacaacttgacgcagtggaagatttccctgggtacaaatctaccaataatgtagtcattgtggatagtgtactcattgcacaatatgaagagatgcaagaggtgattaaaggaaccacaatgtgccaacctttgtcaacagaccaaccaaacagaatgaaggatgccactgcaataaaattttgaggaaggacacacattagacgtactcggaaagtgttgaatactgtatcctttgggatcgtaccgttagctttgtctctttcaaaacgtgctaaggcacgtttataataaacgtcgatgattcgacctgtaaaaaaggaaccacaaagaccaccaataccagcaggtaaataacagacaccaataatggttaaatgatacttataggggggtagagctaattcattagcaatagaagataacattagagtccacatggcaaattgtaaaccagctggaaacaaagataaaaggatttcaggtcttgaagtgattttcattgcaccagtcaaatccaatgatggaattttgtggtctaaggtctcataatctggattatcatagtggaatcttttctgtacagatggtagtaagaatagaggatttctgttgattaaacgaggtggtttgattgatagattgcctactagtgtacgtttagtctctggtaaaaggaaaaaagctatggcgaatgaagtaccacaaccaatagttaaaaaccaaaagatagctctccaattccaacgagcagcaataactgcaccaagtaaaggaccaataccttgaccaattaggacaaacccagatgtggctcctacaaaagtacctctttcgtgttttaaagtgtaatcacctacaacaccagacgaaatggcgatagtaggtgagatcccgatggattgaatacatcttagaaagacaatgacaccatatgatggtgctctggctaacccaatcgaggcaactacgtaaactagcatacctaataagatgacaggtcttctaccatagacatcggccaacccaccagagacagttggagcaataccttgaaacaacagatatacaacgacagtgacattaactttatcttcatccaaatggaattgcttctctagttgtcttagagcaggataatagataggagaacctaaagatgaccaaaacccacacatggttaagatggccaccattgcccatttcattgggtatgacagtagggtatatggagcagtagtaacttctacaggagtaccatcattgtcatcagcgtattgattgaaagaaagagagtcattatctgataattctcttgttgtagtccttgacatagtagtatggattttacttgggtatgatgatgttgtggtcaaaagttgtgcatttttattacgatttgaaatggtagcatgtaaattgctattatttatatgtgtatctctttcattgctactattatcttcataatttgaacgatactggcgaggatggatagcatggtcttcacttggtgaatctgagattgaagataactctgagtcagatatctggtaattatcgtgtactggcataatttataaaaatgtgtatgggtacacctataggtgtttatatatttgtattagatgatattttgctttatggtgactttccaattaatttggtttacttaataatttatccaaacaagaacctcggaaaactggaagcaaaaagaagagatagaacaaggagaggaagccgacaaaagtaaagataagcattctatgaaattaagttcactattagacagttcatataattaaccatatatatatatatatatatatacgtatatgcatcatctaagaggtatcagataagaacaaaaaggaataaacattgataaagtgataaaagtgtcacctaatgagtcagtatatcgggaaggcaatacagatgattccttttatgcacaataaaaaaatttctttttctttttctttttcttttctttatttcttgcctttttgaattggccttctaccacgcagcaaaaatcctcgaagccctttccttctttttttattttattttatttttttttttttttacctcatagaaacaaaaacaaaaacaataataaaacaaaagaaactgtctcttcccatcacaaactcgaaaaattcattgcctgcaggcaaattcaccatcgcaattttttttgttttttatttttttttttttttttttcgtgaagtcgcggcagtcggaagtcggaactcggcaaatctcgcgatcccgcgtttgcccgttctttaagggtgtgtgggtctctggttacattgttttaggtcggaataaatagacgtgtgtgtgtgattttcggaactggtcggagctgatcggaacagtaataataacatctatacaccacacacttacaacatctctagaatgtgccctaagttttttcttttttttttcaatttgactacgtgttgtttggaaagacctaaatttcaattctttctttttcattttattattttggattcataactctttttccgtatataatgataacattctacaattgttagatttttttttttttacttttttaatcttaattagaagaaaaaaataataagacagaatatgaataaaaacaagaatatgaataaatgcaggcaagtaaaataaagattcaacgaggtaaatgacatattttatcctgcatattagaaaactttgaataaatgatagaaaaaaaatgaaataaacccaaatagaatagtataataagttgttactttaatattattattcaatccatatatatatatgtgtatgcgcatgtacatgtatatgtaaatattttggtaaaatattagtttataactttctgttgttgttgctttgtttgagttcagatttgttatcatagagcaacatgtcagctccagccaacttataccctggtttaaatgatttagctgatatctttgaagaaatccccatagaaataattaaatatcttaccttattacatgaaattgatgcaaaatgtacgaacgtattacccactttgtctagttcaatagataaacttctagataatgataataaggataaaccaacattaatggaaataaatactttattggaagaactcatgccttcattggaagaaaaaatgcatgtttcttcgttgatgtgtgaactaataaacacactggataagagattagaattggcatacgaggttgctatcagaaatgaagagattccaagtagtgttagattgggtctagataaccatcctgctatgcatctgcatcatgaattgattcaatctttgaataaaccatctcattctcatagaaatacaagatctacacagaatactagaagtgaagctaagaaagaaacacagtcaaataataataataaaaaggaaaaacaatcttcatcacaagataataataaaagaggtacaacaaatacttcttcttccaatatttcaaataacaacaatagtagtcataacactggtagtgcctctgccacgacatcttcaaaacggagatcaaataatagtaacagtaatagtcacagtaatggcagtagtaatgctaattcctccacatcaagacaacaaaaaggcaattccaggaataattctaaatcaacaaacgatgtagcaacgcccacactaagggtcaatgaatatggggaacctgtctattgttactgtaatcaagtagcatatggtgaaatggttggatgtgatggagaaaactgtgagttggaatggttccatttaccatgcataggtttgaccacattgcctaagggtaaatggtattgtgatacatgtaaagccaaagtacgccaatcacattgaggtaaatacaaatattagtacatatattcatatacatatgtttcatgattattatataacggtttagaagatacctataatattatctttatcattttcatctgatactcgtgtacatacattgctcatgtctcaatctatatattattttgtacgtattaatttttgagaatgtaatcctattataattgctagcgacggcagtagtggttttgaatattttctgttaagtagcatatggtaatttaaataaagttggtaggcaaatgtgatgcaattaccaaaggattcttatagaaaaaaacaaataacaattgacattcaaacctatagtaatacgtatttttgatactgtttgttaggcataacgttctatggaatgagaacaacatatgagaggatcagtaaagacggtgtctgttggctaacatattagttagcaaaagtccatttcatgaattagcattgtatactcattatttttgaagacttaaaaatgtagaatgtatatctatgacaattgtgccattggtcatattagttgcgtgctgatttggtcatgcttattaaagaaattaatgcatttcttattgagacatctaccaagaatgaggttgatggagaaaatatatattattttatgcctatactgattgaaactaagattctacaaaaaaatacaaagaatttattgcaaccgtgatttaaaaggagaattagataaaaaaaacatgattgatctttaacaacatgaacaagataaatatgggtgcaggaatgtcaatctattcaattatctttaaagtagattttataatgaaaattttaaggtaaatctaccaattaatcttaaaagtgataatatagtgtccaactctctttaaaatactgaaaagaatcagaaggaaagaatggtatgtggttaaatcttaatcacaatagtacaagatcaaccaagtggaaagtattaggcaggcatactacggcacataagaacttcacaaaaagtctgaaaagtaaataataggttacgttaaaagaaaataagcaaactgctggtaatagctattgaattatggtataatttatatagtattaattttttctagttatctatttattttgaatagatattgtatattttctaataacattcatatataattaagactgtaataaattgaataaaaaaaatatttttatggtagttgtagcagtggtcttagtaatatattattttctaattaataaaatgtaaacagataaaatgaagtattaaactagctactatgaattcaccaaaagctctattcttagagattcctgggaatggattcaaatattgcattctgaaagatattaacaaagcaaattggccaacacatattataaacccagacagaaatgcgttgaatgggaagttatcacgaattaaacataggaaggcaaattgtataacaccgataataaccaaaaatagacaaaatatatcaattaatttcaattttggatatttatcaagtgcatcccaatacgatttcattgatactctataaacatcttggaaatcattccaaatggaattggatttcttgttagttgcattggtagatgttttgataaagttagctgaagaagtattagcggccatgctttgttttattttaataacttatagtttaatggaaataatatgtgtttgtttatcaagttgttaatttaattgtttaactattgcagttccttttttctataagcactagtcagtttgagtagtttttagtttagatcactctactaacatgaaaatgggacttgtgatgattctcgaaactaacatagttatgtttgcattatagctttctttaatgttcttgttaaatttggttcttctttctactatatttatcttttttagtttcctttttggctaagatttttttttccttcaatcgttaatttaatgaaaagacttcagttctctttaattttcgatcaagtattgaaaacaaattcaagaagaaagcagaacgttagaaagaataggctttacttatgccctctactcttaatcaataggtatgggagtaatcaagttagtgaacagctggactgggaaagtattggaatagcagcacttgaataaatattagaaccaaaacaatatctaaatggataatattactacaaaactgagagaggctgaattagaagataaagcagaagatatcgaattagaatacaccgattctaatgattttgatgaagataatttatatattaacgaagaaacggaaacaggtagagaaaaagtggttatatcgcatcctccacttcaacggattgtacctcctttaaatttttgtccagtagaaaggtatctatataggtcgggtcagccatcacctgtaaatttcccatttctgttaaatctaaatctaaagactattatatggctagcaaatgaagagccacaggataacttgcttgaattttgtgataataataatatcacattacaatttgcagctattaacccagatggcggtgaagatgacaacccatgggatggattaactgaacattccattattaatgctctaaggactatagtttcttcagagaattacccattattagtctgttgtgggatgggcagacacaggacaggtactgttattggttgtttaagaagaattatgggttggaatttggctagtgtatctgaagaatatagaaggttcactggtagcagaggtggtagaattttggtagaattattgattgaagcatttgatacaaaattggtagaaattgataaagagaaggctccagcttggttacaaacggctctatgactttcatagtttttaatctcctcccttctcccttctttttcatctattgttatttattctttttgtttgtacgtttattattgatcaatttatgttgatcaattgttttctcttgttgttcttgtatgcatttacgattcacataaaaacaagaatatagatgaaaatctaagttcatcaaaaataatactgtattaaaaatatatcatgatccattatgataaagtatttttggtgtatagataatagcagggttgtgacaatttaggatataaagctaatagggtagtggaatacatgagaagacatactcattcttcacttctctagtttgacacttttgtatgtgtatataatgagaaagttacaataattatttgagaatattaaatacgtgatacatttatatggtctagaagtcaatatagcacattaggagaaagcatgaaaattaataaggtatacaccttttaataaactctacctggaactgaaaaacttgttcatatcatgattttgaatagcaaattatgcaatatacataaattacaatagttttagcagaaaaaaaaaatatggtaagtatctttagaaaaaattcaagaaaggacgttactagtttgttttactatatcttctgtcgattaaatttgtaaatctgtttcagaattttctttcagagcattaaagtattatatatctaaaaaatgtttaatggatgtaactattataatcgaagtattgaaaaggaaataactaagttctgttgagtttttatattactcgatttttaaaccattgggataatctttttttttctgaatacaatattagtgaagggatggaaatgtcaagaaaagtattccaataatgagtaaaatagttttactgaaatagaatattctaaaataaaataaataaaaaaatgatattttaataaatgcaaacagtgaaatattgattatcatttacatttcaagaaatgttatcggaactatttgattaatattttggtgttcttcaggaaaaaatattcaagatagatatacataaagccaagtattttctcatttcatatttttgtttcatatacacttttttgaacaatattttttctatagtgtatataaagaaaaagaaggtaaattttattgcaattgtataaactgtttattatataataaatatgattaagaataggcctaacttactcaatatatgcaagcgttagtgctcgataatttcagaggtaggatatttttgggacaaaaaatacatgacttgctcaaattttatatacgtaatatggattgtgtaaatgtatttttttaatgaatttctatacctcattttttatcataatagctacatctactttttgaataacagatttaatgttattcatttctcaaaaagtagtagtgttgaaataaaatgttctataatgaaatagatagaacaataagattttagcagacactaaacgataaattgttgagtaataattgttgagaggtcaccaaaagttgttgagtttgtttatcaaatatcttactgttcgtagaggaaaatggcttaatgttaacatatataaagccaaggatttcatcatacattatttttaccttatttacaatctttgtatattattatttctatgctgtacatagagaaagaaagtgaagaactttattataattttgtatactaaatctgtttaatataaattgagaatgtttactatatatccaatgaatacagatgctcattctcaacactcccacatgtattgcacaagtattgaaattaaagaatagttgctcaccctaagatagatcttagaagtgtaatattaattcattgaacttacaataattcacgttttctatttgaatatatatatataaatttctatttacagcataatactgaatcacaaattaaaaagaggctaccaataaattctttatttaactaacaactatactttgataagatgtgtacaacatactaacaacaccgaaaagaatcaggaagcaatcaaaccatataatcatgttaatttgccttgcagtagtgtgggttggtttttttaaacctctagtataacagcgtagatgtaccattggtggaaccacatatactaaaggtaagcaacaaaatgatcctacaatagcaactactttatctaaggaattgattccaaaatatgcatatgtggccactgacgatacgataatagacctcatcaaatttttccaccacttaatcttccaattcaattttccagaatacaattgatatggtacatttaaagattcttgacctttattattaccactatatatcttgagaaaatttgagaaaaatttatcttcaatgatcttgattgctggaaacaattgcaatggtgtagataacatgatagccaaggaatataatagctgaattatattaacaaatatattttgttgaggtaagttcaataaaataactgtctccacgtttgatccataaattaaatatcctatagaacccattgtaacaaacaatattgttactactgttataactgatcttaaaaccttaggaaaatgttcaggctgtttcattgactcttgtatttgtataatcaatccgataccttcaaaggcaaaaatagctgttccaataaataaggaccatctttctgtgttaacaccgtatattatgtcagtcataggtctaaaagataaatcatagatccaatgattcaggaaaaaaataacaataattattaaaccaaacataatacaaaaattcgatattaaagctggaagtgacaattttgaaacatttctaacaaatgatattggaataaatataataagctggaaaatcattatatatgctaagttgatattgcgataaaaaacattttctacgaaagcagctaaatttttacttgtaaaaatcatatatgcaccagcaaacccaatttgagtgatacctaaagcgaataaaatcaaaatttttaaccaatgcccatacaactttaatccaatatctccaaaagaagacacttttgttatttccttagccttaactaaaatataataacaccagtatgagtaaacaccaaaaaatatcaacatcccagtgctgaataaaagaccaccattgaaaaatgcctttggtaagaacaagactcctgttccaataaatgcttttaatagtaacaaaaacgcctttctatcagatgcagttcccctaacagcatgtatttgttctttcatagttttgtttgttattgggaccacacttcctgtttcttcatctatggattggcctatagattcaggtaagaaatcatcttcaaaagattcaccagcaaaatgaccatagagatataaaaattccaagaagtttcttgtaaaaaaggggacatttgtcaaatcattaccagattcattaacaacttcgcaatcagattcaaatgatggatctatacttctcgtaattttcggtattgatccataaaaaacatcatttttacagtttaggtctgaattagtagatgctgatgcttgttcatttctgatctttttaacaatatattcccttctgaacccaccaggcacatttaaaccactagcagtcgatttccttcgatttctttctgatgttaattgtatatcttccaatgtcttatattttttgctagaacaagattgtgtcgccaacttatatatatctcttgtcatatctccagctgatcgttgtaaatttctatcaccaataaaggtatccgtatctttttgctgtaaagaagaagaagaagaagaagaaccattcgcattattaatatttacctttttcatatgatctgacaaataattttccttcacactattcaatatttcttttccctcaacagaatcactagtcttaaaattcggtgaatggatatcaatgaaaagtgtagcatccattcttttcgatttgtgacctatagataaaggacccccatttaaacccatatccattgagcctttttgagcagaacctcttctactgaccagcgattgagatataaaatgattcatacttttgttacccttaaatcgaggaacttggatattctgacttttcattaatagagaatccacatcctcgtctaatcttctcacaactttatctccactatgcatgtcagttgatgaaaccatttgtttttttggaaacatcggaatggcaaaatagcaaagcctcaatataatctttttgcaaattgattacgaacaacaatcactccttagtcatatcgcttcttcataaaccatgatattctttttataaaactatgtagtaacatacacatgaagtagaagtcttcatgtattgtgtttgactagatcaaacaactcatttcttatctcttttctatatagagagctgatatgagaaactaagcaaagacaaacactgacaaccgaaaaaaagaagagatgccccattaacaagtaaataatagagaaaaaagacgataaagatcattataacatacaaaatatcagtacatgtgtataaacccagagtctatccatatacatatgaatatgccggaaattatataaagaaaatgcctatattcaaaaaatatatcaattatccatcataaagtcaaatatactacccatatcaacgtaacgacgaccacagttatctaagtacttctccaccacacctctattgatgctaaataattctctattttgttccaccagtgccaaaattgttgattctgataacttttctcttgggtaatctggttcaccctcatggtacaaaggctttaacacttgtttcttgttcttctcacaatcaaaaagcgattcaaaatataacagttggttatacaactttttatctgtgtatctataactcatgacaccagtgcaaccttcacgcaagcaacgtttgccaaatacagatatctgtctagtcacattaccacacgtgacatcatcacagaccaaccaaccagcataatataatgatatatgtgctcttatagtcgattctaattgacaactcaattgcaacggaagaaacaaatgatcacatttcttgcattgaacaccattataagtcacttggtaatgatttgaagcaacaatcccaccaaatggaaaggatgccatgcatttcggacaagataattgcagattactagaatccttaaatctttccatatcagaaatcgttgtctccaaaggctgtaaaacattatttccagacccaccattttcatcatatcttctcaaatattttctactatctagacctaatgcttcactcaaacggataacattaaaaccttcaattctttcaagtaatctttcgacaggggcaaatatttgcttttccaagtaaaactctggatctggcactactccactatcttttgccattacttcattcaaagcatatgccctttctgctggatgtaaagatgttgatgatttcaaatcatttttgtttctagttattacatatgtaataaccgtaccagctttcaccaatctaccagcttttctcattcttaatgctacttgaacagctggcatagttttaccaccaggatatgccgtaggatcctttgaaagttttgtatttatcttatatttgtcaaccctaatttcattcttaatcatcttagacctgatatcctctagataatcatatatttcttgtaatgatatttctggatctttatcggaaaggatagtatttaatacatgactggatacttcctttgaaagtggacagtactcacgacgtttcatatctaggcctttaacttctaaggcaacatgttcactactgtctttatccaaagtcacatttaaagcagcatacttcttcttagcatgcagtaataatcttttgaaaacattatcaatatcaatttccaataacctataccgttcattaaccaattttttaaagttctgacctatttttattgcctcttcataactttgacaccctgtatcaatcataacagaatctgtatcaccgtaaacaacaaccaagttcatgctttcagctaatagtcttgtattcattaaaatttctctacctttattagtgacaagcattgccaatggtttagcataaaatctactgttaacgtaacctaaacaaccatacatagaattagcagtcaattttagagcctgttgtctaatgtcacattgggcatacttatgaggatccttttcattcttcattatctttttcacttcacgacgacgctccaccaaagttgctaataatcttggcaaaacaccctgtgccttatctgacgatggaatttctggcaattcatctatatcgttaggattcctatccacagtggtaaaacaaatattaaattcttgaataatagaaggatataatgagttgaagtccataaccagcacataattcttatgtagacctttttctggttcaaaaactaaaccaccttggtacttagccttttttgatgacgataaagtagtagattccagatcatcagatgtttggaattgttcttgtttcctttgttccttcatctttctagtttctttatccggcacaatataactatttctggcaaattcatgtaacaaaatatattcatttctacctgctcttgtaccacctaatgtttgtgaccaagcattaccagctaaattagtcaattgtttagttaacgataacatttggattctaaacgatacttcagcagtaatcattgcatttgttacattttcttgtaatgctaaattcatagtatcagcatcctcttgatatctctcatttgcaaaattaacatccaaagacttatgttctttaccacaggttattttatacatttcacttaactcccaactttgacatttaggtgtcaaagattgacccatttcattagcaatatcacatactaatctacctgcaattaattcatgaatgaaaaattgattcatggtaaaatgatttttaccaaatttttctggccattgtttccgtacacgtcttcctaaacaactaaaagctgggatatttaagttgtggcatctatgaactagaatatccaaataaactttttctaatctatgaccaattaatatatcgggatcagatgctctaagcattgcacaaaaacatgaaagaagtgttttttcattgttaaataaacgtaattcacctgttaatttttgtttagccaacgtagctaatccaaccggatagtttgttccctttggtggccttactaatgtagtaatactacttggctttaaatcttctggaattggtgcatctaaagacacattatcgtatctagccaatgttatagctacaatctcttgcttgttttctctaggattcatcattgtttgaatagctaaggatatacaacttagtggtgggacagatttaatgtcaagaggaatcacatcacgaggtgaatcaactgcgacttcaatcgaacaatgtgaagcgttggtcaaggcgtcaaaattaccatttttaatctctaaccaacaggggcccataattttgttttgcaccacaaaactttcaaatatattggtattaccaccaaatacatggcaaaacttgtcactagaaagttctggtggtattaaatcgtaactagattttggtgtattatatggtaataagactttcaaatattcagtttctttaggaatatctggtaattcaaaggcgtatttcatcttttgtggtttcgcacgaatattagttaacccatacttctccattatgagaggggtaatctcttcataaacatccatcgcagaatactcatctcttggaaggaaataaagttctctgcaaaggccattaatttgaaccattgcagatactaaattattatccaatgtctttactttaccaaaaagtattaatgaattgttgacttctacacagtcaagccaatacatttgaaatgaatttgtttctggatttaccacttgttccttagaatatttgtttgaaaaatttagaggctcattagtagaataatgaagtgttttagtaggttttgaaagtgggtttttaatagaacaatttgctggggtacctggtgccgtaacaaaaggcgatgtatttggattacttcttgaattgaaatctacctttcttgtagtatttacacccctcataggtcttcttttaaatatcaattcatcatcactatcactatcaacatcaactacattttttgatagttccttattaacgactaaatgtgactgctttgatttagctggtggaagattcttaggcattgttggagaattttccacatctttcattaaattacttaaattttcagcatcagattctaaaccaatgttagcatcggaagtgtcaattttatcaacaatattacgtccttttaatggcgatgaatccaattgaacttctcgtgcagtaaccatactagaattgtatattttaggcttcttagtaacaatattggacatacctgaatttattttagtcgcatcctcatcaacattatgattatggatattagaatcgttcaattttctttttaaagttggagatgatggtaatcgatttacggaagaggacctaatggtggatattggttgcggtgtcatcttatcaaattcccctaaaatatcgtcaaaatcatcaattgccatagcctttttgttagttgaattattcaaagacaatgctatatttttttttcctctgttgttgttgtagacgtaacatctgtcctatcacatttccttctttattgtctttatctctttttttcgctttgcgtttatttatacttgcatccttcataccactattatcatcaaaatcctcgaaatcttcacttgaataataatgttcattttgccaatcatcttccacacctctgtcagcatatccaacaccgtcgtcatccaccacaaaatcatcctgcaacaattcttgacgtcttcttctcttatattctacttcatctatttcatcatatattctatcatcatcttcctccccgtcattattaatattttcattacctgaatgacgatgatccttctttgcagcttggagacgtctcaatttctccaatctatcatttctactcatttttggacaaaaaaaaaatggaaagaacaataatttgtgacgcaaaatctcttaaataatctttatatagatagattaaaataatcttcccagtctcttacctgttatctatttctatttttataattttttcctgtgtgatgtgaaatcctatcaacaagtaatcatgcaacttcagatcatacccaaatatgtggaattaaaacttcagaaaggaacttgtgctttataacactgtgtttaatgaaaagtaatctactgctttgaactaaagctaaatcagctatattggtgatatcattattatggtgatgatgatagcttctgttcttcaataaaacatttacgcgtgtgcctctccacaactccaaaaaacaaaaaaaaaaatggtgtcaaaaaattatcaaaaagagaaagaaaaacgcgtaaaaccacaacatccagacaccatgtctttttcttcgtttccaagatttcaaagaaaaaaaatgaatataaaatattttcttcagtttttgtttataaaagtagggtcaagagtatataaatctataatttctgtttagcaagctatataaagttagggttaaaatactgtattttgttttgaacttgtgatggacttcgacggaaatgaattccgttccgtggagtttttctttttcctttattttttttttaacatctagaaaacaatacaagcaatttgctaacgccatcgagcatctaaaacttatggaataaacttttatctcaaataatacacagatccatatccatgcaagtgatcaggcattaaatgaatagattacgtgtgtggatatcacatattttaacctatatgcatcggtggagatgttattttaaacgtttatcatcaaattactgttttgatgatcctgtttccaattacaataaattaaacaaaacttcgcttaattcttttatagataagataccattattattgttattctttctatcttacatcctctaacgttctcttcctcatttatatttttttttttgtctctattattgttattgtatacttttaattagatcaattaaatagtcagatcaaggctaataatatactatcaaagataggtggatattacagatggacaatacaaataaacagaaaaaagatgaaggcacaaaaaaaagaaggaaattagtcaaatcatgtttgttttgtagaaaaagaaaattgaaatgtaataaggccaaaccaatgtgtcaacaatgttcagctcgtaaatttccaacttgtgtttatctatctaatttcaattttgatgttgtctctgtagatgaaatttttgatcaaaatccaaatgtaaagcttttaaatgaaataattgatttaaaatctcaattagatagtcgtatgaatagtccaaataataataataataatgataatgacaatagtgataataataatactcaaaatgataataacaataccaacactcaaagtagctatacgtcttttaatattataaattcaaagacaattaatccacttacaattttcaaaacttctctttggagagacaatcatttacaaatttttggcccaacctcatggagaaccatactgactgcagatggtaccaaattccaacttgagttcactaatctttgggataaattgaaacctaaatgtacatcagaatctttccagtgccgggatctctttctatcaccattacaaacagatgttatgcacaagatagatggaactgtcactgatatatctctaactcagttagtctgtaatgatttacctaactttacggaaatcaaaaaatgtctagattcgttcttcgatggtcccttacacgaattgttacaaatcttggatccaaagaaaacatggaaggatctatatgagtgttttatagttgatcagaattcggacagagtcattaatatgtatccaccagatggtatcaatttctgtaagattggaatcatattgtctattattgtactttgtacatatgataataattcatgcataccagagtcaattataagatatttcattcaagttaattccatgagatgtttggagataaattttactgaaaatgcacagttcttattaatgtgttgtttctttaagattcatcatggcgaatactcccgttgggatggttcacaaatattgcataagatttctgagacctgtcaatgctgtatttctttaggatttgataatgtcagaaaatggtatagaaataaagaatctattgttggtgatttaaaatatttggagaatacaatgctttgcacactttttgttgatgttttcacatcttttgatgttggtaaaccaactttcatttcaaatcagatgttatcaatgaatctatttgaacaaaatttgaaatcccatagagatggattttttgcgatgcctagaaatagattgtttatagatttcattaaattggctagaaaacatattaacaacttaaattctgtatccagcaataattacaatggcagtaacgataatactgaagaagatattgatacttatattttagaactacagacttttcttactacgaatttccccgacctatccaagtatacagcctggggcattatattttcggtggatccatttgaaatcattattctttctaatacgttatcgatgttatttaacttccataacattaaaagggcattttataaagacatttcaattagtaccaagaatggaatggttaaatatggtttattgactacttcattatgtatcaatactttattgtccatgtttgaagcagataaagtcgcgtaccctgatattattgatgcagggactcgattatcaccatatctaaatctttctctatcattaataaattcggcatttattagagttgtgtcggaattttactcagtgttcatggcaagactaactttacaagaaaaagggtatgtcatattagataacaaatgtgaccatgacgactcttcaactgtttcacttgacgataatcatatatcaatggataaatactattgttttacttgtgtgatgcaccaatttagaaatatattggatcagatgtttttacctaaatgggatcaactctaccaattaatgaagacttcatactcactacattctctgcttgtgttagaacgcatggcaagacagttattagatcaaggcttaatgtcaagaaaacaagcagaaacccactggcaacagcagggtttggatttgaatgagatcactagcgacttattgaccacatttaccaatgaagtatgggatggatatgctgcgcattcaaagtcaatttggtcaatgacatcggaagagttattgcattttgatgcagaccaatcatcgtagggtcataaacaagtcactgatacgtaccagaagttttaatatatccataaacaacacctacattgatcgatggatcaaataatctaactgattatgaatatatgagccacttctatatattcataatgcaccacagtgagtggaaaacaataaaaatcaaccaaataaaaaattgtaaaaaattagaagtataaaaaaaaaattaataacaaaaaataaagccaaaaccaaaaccgaaacaaaatgagaacaaacaaactgttcgctgtttgatgcattgaaataacgtaaccttcaatcatattgtaaagattaaaaaatatcatttgggttgtttatagagacttgtagataatcagcaataaaggaaaataataattgagactaatagataccctctatcttctcccttcatctttataaaaaatacatacaaatacacacacacgaaaacacacacacaaatatatatatatacaatttccatatacttataaacccagtatcaagaaagataagaatgatcaaatccacattactttatagggacgatggtctaccactatgtatgtctgtagatgatgatgacaacagtccagcattaaatgaacaaaaaaagtatgtaaagttgatagtgtcccggatgacacctcaatcagccaatgaagctacgttagaaagtaatggaagttatgagattagctatatacgtaaagacgttgtttgttattttgtaatttgcgagtctggttatccacgtaatttggcattctcatatttaaacgatattgcggaagagtttcagcattcatacggtaatgaatacaacaaacctactctaagaccatatgcgtttgtatcctttgatactttcttacaacgaactaaacaatcctatagtaataagaaagtccaggacaatctagatcaattgaaccaagagttggtgggtgtgaagcagattatgtctaaaaatatagaagatttattgtatagaggtgattccttagatagaatgagtgatatgagtgcatctttaaaagaatcgtccaagaaatatagacgttctgctcaaagaattaactatgaattgttactgaaacagtatgctcctattgcattattatcctttttcttcgtgttcttagtatattgggtatttttgagataaatccagcaaccataggtaatataaacaaaaataagagaaaagagaagaagaaaaaaagaagaaaaagaatatatacagcatagaagagcaatatacatactcataaaccgattcaataataataataataataatagttttgaaccaaattgaaatgatcctttaattccactctttccttttattgtttgaatccaacacacaacacgcgtttatatatatatatatatatgtatatgtatatatgtatgtatatatgtataattgtatactatatgaatctatcaccaccttttaatccacccaatacatctctcttcttgtttctctttagtgagagttcaagcagtttatggaaggttgcttgatatttgggaattaaatgtgtatgtatgtatgggtgttgttgcagactcatgtttgttctttataggatgcaacactacttaaaggcaaacaaaaaacttcatttcgagctttgcttatcttagagacacgcgatactaaaatggagtatacatatatatgcttatatacttgaatatttgaaactttgcacaaccacgaccagatatctacccatctatttgtctatttatctgtctataaaagagctagccaatttttccatacaaaaatgttagaacaacaacaacaacaacaaccaaatggtcaggagaaacccacattttctcaattagttaaaagattccggtttattagagtgttaaattcaaatccacagagtaaggtcctttccctcttaggtacaatagactcacaagatgccataatcacattggagaaaacccattttaccgtcaatgaatctggggaagtaaattgcgacaatgaagctctgaacacaggaacggatatggtagatgaccgctcgttaagtattgaggatattgaacacttgaaagagatcacatgcaacgatatatattattgggggttaactatgttgagacaagatctagataccaacccaaccgccaaactgaatctgatctggccagctaccccggtacacattaagaagtatgaacaacagaattttcatcttattaaagagacaccggagatctactccagaattgtcaagccttacattgaagagatgtgcgagcccggtagactaaaatgggttcataatattttgtatgaaggcgcagaatctgagagggttgtgtacaaggattatgactgtgacaaccgagatcaagggtttatcatattaccagatatgaaatgggatggagtcaatatggactcattatatttggtggctattgtttatagagatgatattaaatccctacgtgatttgaagccaaaacaccaagattggttgaaggacataatgaagagaattaaatctgtggttccatcatgttacaattatatgatccaccctgatgagttaaggattttcatccattaccaaccttcatattatcattttcacatccacattgtgaatgtgaaacatcaagggttgggcaacggtatctccgctggtaaggcgatactgttggaggatgcgatcgaaagtttaaattatttgggacctcaagggtttgaatgccgtactttgaattatgttattggagaaaaccatgacctttggaaacgtggtttgcaggaagaggttaagaaacagttaaaggaagatggaattccctttgggccaagctactaatatgcaacgattaacctaaacagaaactaccgtttatataacacagcattctattatatatatatgtgtgtgtgtgtgtgtgtgtatctttctctccctgtcgttaatctcactttctaataatgtttgagtgtatcgtgagtagtgagtaagaagacactataaagaaagtgagcacgtgaccaaaacattcttgagatgaacacaacaaataaaaaaatatacaggaaaaagaaaaaagaaaaaaataaaatctttcttgtttgtattatttgctcacttaaaccacaggcatcacaattctgattgttagacgtacgatgttggacttaaggacaatttccttcttctccaccctttccccctccttatctttctttctgtactagacgtaatcttatacaacacaacaaatcaactagcatatacaaaaaaaaaaagaaaaatgtctggtcgtcaaggtggtaaactaaaacctctgaaacaaaagaagaaacagaaccaggatttagatccagaagacattgccttcaaacaaaaacaaaaagccgacgccgcagccaagaaggccatgatggccaacatcaaagctggtaaacctctggttggtggtggtatcaagaaatctggtaagaaatagttgtagctggtttcctactttatacagttacttaattaattatttatttattgtccacctccacttccacttttaatcgtgcaactatataaccaaccaactgttcatccatttatatacttgcatacgtataactttcgcctccatatgcagccaaaatttatatgtatatgtatatgtatatctgtagatatatagcacactaagaaccatactcctcgcataacaaacattccctcctacctctttactctctttctttctttcatgcttttgctgttttctcctgcagaaaattctcgaagatatcgatctatcgacgtcgtctttcgcagtttcctattcctacagctggaaaaaaaaaaggaacatatgaaaaaatttcaatatttcatcacttcataatcaaacaatcttgcatgagtgagatcgtttacatccttaatgtttttcagatattcttgtcaaagacatttatattggatgtatctctcatatatgacataatttaattgatagacaacattataactgatatctactctcatcttccacacttctctcttcccgttttctgtagttcacacatagtggtcctttcatctttcactatatttcaaacttgtaagtgacacagataaactaaactacaatactccctgtcccatctttttcttttcaaacagatacatattatccacgtgcactttttcctcccttttatttcaacagcttctatctgaagactatattttggttacattgaaatatgagtaacacaacatctcaaacaagaaaaaacaataagtcgctaagtaaatataaaattgtctttctgggtgaacaaggtgtaggcaagacttcccttatcacacggttcatgtacgacacatttgacgatcactaccaggccaccatagggatagatttcctatcgaagactatgtacctggacgacaagactataaggttgcaactatgggatacagcagggcaggaacggtttcgatccttgattccctcctatataagggattcgagagtagccattgtggtctatgatattacaaaaaaaaaatcttttgaattcattgataaatggatcgaagacgttagaaacgaacgtggggaagataatgtcattctttgtgtagtaggtaataaaagcgatttaagtgatgagaggcaggtgtccactgaagaaggtgaaaagaaagcagaattgttaggcgccaatatcttcatggaaacatcaacaaaagtcgggtacaacgtcaaaaatctattcaaaaaaatcgctaaatccttaccagaattccaagatgataacaacaataacagcaataacaacggcaacaacaataatgatagtaacaacgatgctattttagatgaatcattatccaatactcatgataaaagtacaggaattattgatatatctacatctcaaaatgaaaatatagaccagaatggttcctgtcaatgttaatcgtcataactatcatcattattaaacacatacacaataatatatatatatactaccatatgttttacacacatacatatatacgttctttgaaatgaacataatggctattccttcggtcacattatatcaaattctgtatcgacaaattgaccttttcttaaaagaaatttacataacttcggtataacttccacttgtatagtctctaaggggaatttttcaccatcaatagacaataaacctgagtctttattcatactattatcatcatattcagtttcattagaatctgaactgcactcacctaagtctttatctttattcttatctttatatttattctttcctttacttttattgctttcttcttcttcttgtcgtggtactaatcgatatgcatatattttggaatgaatcacttccggttgtaaaacatgcgatcccttatctaaggctaacaggataggcaccattctagtgaacggagtacgtgcatctgttaataccatatccataacaccatcgctaggtaatgcagcagggaaaaatttcgtatctgctgccacgtatggcatctttcctgtataaaaaataccaagattgcttgtcaacttgggatctacacgttcccaatctgaaggtattttttgatctaatggatatttgattttaaacatatcttcagtgataaaattgtcaatatcataattattgctattaccattactatcgctaccatcatcaccaacatccatattcaattgtaaaccagtattatctaaattactattatcactgatattgttgtatgttaaattacgtcttgccgatacttcattaagataatgtgactttaaatcatttttacctctagtaaaatattttacgtaaagatcacatggatatttttttctctgtaaaatattgaatgcaacacctaattcaaaccttgcaggacctaaccatctaataaattctgtgttaatatctgattctgcaatgatcccatatgcttgacttaaaaatgatagtatgcaatgtccagccttgcaagaaggtcgtgatatacgcataatatcacaccgagtctccacggatttgatcaaaaacaatgttgcatacgatggattatttgtccaatgacatgatacactcattgcattacctgatccacaaggtatctgtgtgattgctattttattaaaagcccgaaccctatctggtcttttgtagagtccgtttattacttcatgcggtataccgtcacctgatgcacatgctatcgtatcatatttatctatgtctatattctgtacaatgtcgctcccatggtctttatatttaatatattgaatgtcaaatgtaaatccacttgccattaataattttttgctctttctcataaatatttttttagcattgcctttaccaccatagggattaataagaacaagaatattacgtttccttttactattcttataacttctttgtaaaatcttttcaacaatatcagtttcatcacctccattgtcatcattgctgttattagcaccatcatcaatcaacaaagtcaatcttttaggtactacatcttgtcttcttggctttgcaaaagaaatctcgactaaatgaagatttggattcttttttattacattttcaatttgctcaagactatcattactattaacactattgctacgtgtgttatttttatgaaattgtaaactttgaatatcaacatatttagcatttaaaatcatttcatatagtataacagtattcgtaggaatttgtccattaactgatccataatgatattttctcttgtttcttccgttggcatttgaatcattattcattgtagtagttgtatttgtagtatcaactgacaattgggacacactatcactcagacaagtgacacaactaatcatagatcttgtttccatacatgaatctgtatcagacattgaaccatttgaaaaactggttctactactagatatgcttttccgtccctcaggtaaaagaatgttagcataatcttcatattcataagatctaggttttctagattttatctgtattccatcatctgttagtatcgccaaagatataggaccatcgtcatctgaaccatgcttccctcttccatgattatttttatgattatccttatgtttttttggtttttgtgtccttctgtttgtgactcccaaacgatcaactcttctatcaattttgagtaatgattcatctcgtccttcgttcctcaaatcagatgatttcttggatatcaaagcacgaggtttactacttttcaataacttctgcattaatttcctcttataggttttaattggtttcttaactttatcttcattaatgggaacagaatttgcagtatacatggagctagaggatgaagtagatgaagttgagatggacgatataagagaagtagaagaagaaacatttaataatgaaagagataaagggtcaggttgagttgaataactgtcatttatcgaatgagatgttattgattcctgttgtaaggttgtcaaagacactacttctacagagtcgttatttgacttatgcgagctaaatttagagagaaccacagtgcttccccctttgtcagtatcaacggataaaaattcctcatcttctgggtaatcctcatcttctggataacttctatttctccttaataaattgcttttcttaagcaattctttactattaattagttgcttcaatttgacagattagttaaaacgaaattaaattattgactaatatttgattaaataataacgtaaataataatttaattcaaataaaaaataaaacacagcgataaatgttaatcttgcaaagctaataagaccttgatataattaaacagattcttatttttaatagttagaatagttccaatacaaaacaaaacaacttgtagtcggaaggaaactaacgtcgcttatgtcagtaaatattctgtatatattactgtttggctgcctaactgtgccacaataaatatgtgtttatcttctttttttgtactttggtgttaaatgttgtatttttttgctttttttgaatttttgtcatattgaacaaaaattgactcaaatatgtttatacacaatacacatacatatacgcatgtgactaatagaggtattggatagatacagaaacatataattgcatacgtatttattgctggtgttgtgtaagttacataggatagggagaagacaattaatgactgtatcagtacgaaagacaaatctattggataacatctaatctgctaaaaagtgccatgtacaataaccattcttagttagagtaaattgttgataacataagatacttaaaactgatacttgatctatttacctgtttacatacatgcacatgcacattcatataaaatttgctagactaaatatgtcttctaccttccaggtatgtgtctgggatagtaatgattgaattttgaagattttcatttggtgtaacgattaattcaacctgtgttgtatttgaactatcatcttttacttcaaatttaatgtttgaaccatctgcatttttttcttttacctgaaataccgaccattcaccatattttaatgatttatttttttgtcttgtttccatcatccttctatttaagattggagatatttcttttctttgtgcttcttctgtggctgtcgatattgttggtgagggtgatcctgaatgtgtagttttattggaaccagtcatattatcgatatcagaaatagaagattctaccgagcgattagaggtatgagtatcttgtgtcggggtcggtgttggagactgaggatttattgtcgagttcctttgatatggtttatgatgttgaacaggttttacattccccttttcatcaaatacaggtaatctacaagttggacaggtttgtgatctctccatccaatgttttaaacatgaaaaatgtaacatatggccacagggcaagattttgggtctcttatttttattcatcgatttaatatcttcttgtgtgaataaaatttcttgatcctcattaggaacttcaattttatgtttcctttgatgtgtgtgctctaataagttgtccatacatacaatacagatgttatcatggtcaattaaatcttctggtataatatcaggcagtttatcactcagtttcttattgtttttccacatcttatatatatctacacttcttttcactaagattacagtatccatcactaaatccttaatataaaaagtcctgaatttaaatgggataccaaatgttaaatccaatataacatcaaaaagtttcgtaataacatcgatatatttctcatacatgaattttccttcaaattctcgttcatcatcatcgtcgtcatcatcatcagaactttcaatctcatctgaattaaggttaatatggtgattatgttgattatgatgtctagatgaattagtgtaataaaatgcataaaaattcaatatggtatgaaatagaagattcaaatattgattaaggatagaagcgaagttgtaaccaaacgtaatcgatataatattgactgaattaatatctttataaaatggtttcaaattatcaaagaatgtatattttgtagtgaaataatttaaaattgcaaaaatgatcatatttctcataaaattagagaacaccaatttggtgagagtggtatgctcattaattgtttgcagaagtccctctaatctatcttttaatatccaggtaaacacttgcataatcaagaatccgacactgaacagcaggacattaaacatttgtgaactgttaaattgcgatacaatcataatcatgggtattacaattaatggtaatctctcaaagatatgttcctgctcaatgattcgtaattcaccaaataacagtgtagtcaacccttgccaaattaataggaaatttagcaacataaacgcagatagaataataaaactgaaaccttgatttaatttaattgtccattgcacaaaagaatgtgactgcctgaaagtgctgtaaagtgtatatatggttaaaccataaaccccaatgacaatgacagtttgtttttgtctacgagtttctaatatcgccatcttattttattttatgctattttattttattacttccttatagtttgaatattcttattattcctttttatacgatattccttttatctcttattttttctgttttattttcttttccttctactaatataatgtaatatttatttctataacatagccctagtaatttggcaagtcattgctttctattgcaagttgtctgcaatgtttaaccatgaggaagagaaccttacgggcacacagagaggtttaaaggatattattataaaatgagctggccatattgttggaaatatacagaaataccaagggaagaaaaaaacaagcaccaaaaaaaaatccggtgcctctcagatttttccgcctggattttctttgtcacactcgaaaatttcgccagtgcggaatctcaaaaccggtaccaaaactttagaggaattcctcaaaaggaaaactataaagtggaaatctaacaaagaatcaacgatattatatactatataacattacaacatgccatcatggctcagtgggtccttaataccgccatattaaagatattcatttaatgtattaatactgttttatctcaaataggggtcccgaaatatgtagttccttagagatgctctggatggaaacaagagactcagaacatctaaagcaccagtctaagactataagtgtattcaaacaaacgatcatcagattggtgtttggtcataaattaccaagaaacttatttaagatttttttattttttaaaagaaagtaccagaagtacttatcaacattaacattcatattatatctgatagtttctatctaatagacattaataataataaaaaccaaacaagaattatgtaattgatggagttgcttagaattaacagctgtaagatttgtatttatttagatataattagtgttcatattttaacctataacttgagaaagtctcttgcaaaaacttaaatccaaaagttcttctactaatatattgactgttatccacacttgagaactcaaattaaataacgatcagttaataattatctaattctgttgaaagtttcattgtaactgtaatagttgtaaagaagttttttactttttttattaacaggaagaattattatggcaaataatctttaggaagacaaaaagtttccaaaaaaaaaaaccataaaaaaaagcacacatttattttcgtatgctatgcatacatatatatatatatatctacacaaaatagtaaaaagaataggtcaactgtaaactaaaaatataattagtttagactatatggcagtagatattcggtaaaaaaatttactaatggaagttgaagctcacaacatccctagtaatatcagatatcattacattactactgttatttcttattctcatattgaatatatgtatttgattattatatattctattcagtgtagacagtcactgttttattttatttaatattatttcttcataattttctgttttcttcaaatttctagattatacttttagtgccaaaatataagatattctctttataatatggaacatttgtataacacaaaatatacagaacaactaaggtgaatataatttttatgaaaatgaagatgatcaaattctcttttctcatcatacaaaattggtgattataccgtgaaatcatatacctaccaatataacaaattagagagttgattgaggatcagaactaaaaataaccaaactatacttttgaaaagacgttctttcatctataatttttcttcatatgtaatttatacaatatatataacaagaaggaagaaaagtaaaaaaaaaaaagaactatgttgaaataagggctagtttagttaagctaattctctatgcaaaagagtacattatgtatttaaacgtcaataacagtcaaaatctgcttaataaatataaaatctataaaattttaaaatcctactgcctttttaattgataaacaaattacccatcactttactgaagtaaaacagtattaagaaaatggaatgttgtaatatgaaatggtcagattcttttgtgtatttcggggaagcacaaataatattaacagttattcaaataatcgagacaataatcaactataggcgataatataattactaaaacggtcttatatattgagcagctttttatcgagtaatatattcattcgaagttacttcttgttacttgtttgttgttctattttgtttatatataatatataaattatttataagaaacggttatggaaaatgatcttttatcttcagaaaacgttgtccttttatatgttttctggaactcaatcaactattcaacttgatatattaatgaattagcaatccatatctttatgattagttacaataatataatcgaggatcatagaacatataggacaataggttatggtggcgtagtagaaactataatgaacacggtgtacataaacataatatgctatggtggtgtagtaacaaagatatgtaaacacactgtacactaggtggcaaatggacacgttgtactcaaaacacaataaatcactttagattcagatagaatcttacgtaatctcggtggtgttacctctatattatacaatccaaagggtaattttcagcttgtatggcgcagtggtagcgcagcagattgcaaatctgttggtccttagttcgaatctgagtgcaagcttaacgcctttttactgttgaaaaattcgcatccgtgtgaatttgtatctactccataatgatgaacttctgacaacacaatccacatagaatagtattcctgattcacgtagctagatagaaggtgtagactttactcacaaatttaaacacactactagcatagcactaattttaaataagtaatatataaactcaaccttcttgattattattggttgttctcttctagtcatgttaattgctgctgcttctatatgtttatatcttttctttccaacttttctaaatttcaaatagcaaaatttgtatgtaacattttccaataaggagaattcaagaatacattgataggtctcgttttcctaaaccaacgctgaacacactaacatctaaatatttagagtattatattttagaatttgtcaaaataactaaataatgctgtagattaggtgataagaaataaatatatatataaatatatatattatttttttaattatataactaagtatatttcttttaattttagaataaccagatttacatttgaaaccggaaataaaaaaacattacaagtaacaacttaaatatatatatatatatatatatatattaactgtgattattacattttatattcgtttacattgttgatggatatttttccctaaattgttgtgttgtgtccctttttgtcccctctaattatgactaaaggaaaaaaaaaagcttagtaaaagttaatttaaaaagagaacccttacagaaatatacatcaaccttattatacaagacaaataatcccaaaaaaaacctcgataaataaagaattattatgcatgaaagacaaaatatagtcaacaggaaattaattgactaattacacaccaaatatatatatatatatatatatcattcacagaaatgaccattatgaaacctacatgaaaaaacttatggttttgggctaatcatattttctggaacaacccattcatcaaattcttcagcagttaatactttcaactccaaggcagattccttcaaagtgatattcttaacatgtgcatttttagcgactttagcagcagcatcgtaaccaatcttaggattcaatgcagtgactaacatcaaggagttatgtagattttcatcaatcttatctttattggcagtcaatccatctagacagtggattctaaaagaatgacaagcatccgtcaataatctgatagaactcaataagttggagatcatcaatggtttgtaaacatttaattcaaattgaccttgagagccagccatagttatagtagaattgttacccataacttgcaaacaaacttgtgtcaaagcttcattttgggttggattaactttgcccggcatgatagaagaacctggttcattagctggtaaggataattcaccgtagccacaacgtggaccagaacccaaatatctaatatcctgtgcaatcttgaataaagaacaagccaaagtgttcaaagcaccactagtctccacaatagcatcatgtgcagcaagagcttcaaatttgtttggagcagtctcaaatttgataccagtttcacgagatacttcttcagcaaccattttatcgaaacctacttttgtgtttaaaccagtaccgacagcagtaccaccttgggctaagaaatgtaaatgatacaatgttgcttcaatacggtaaatcccgttttctacttgttgagcatatccactgaattcttgacctaaagtcaatggagtagcatcttgtaaatgtgttctaccaatcttaacaatatgtttaaattcttccactttcttagtcaaagattcttgtaattgttttaattcaggtaaaagtttgttgatgatttcagtcattgcagcgatatgcatgacagttgggaaagtgtcattagaagattgcgattgatttacatgattatttggatggaccaatttagaacccatttcaccaccaagcaattcaatagctctgttagagatgacttcgttggcattcatattagattgagtacctgacccagtttggaaaacaactaatgggaagtggtcggaaagggtacccttggcgacttcatcagcagcgatttgaatcttatcggagatttcaggatccaaagtacccaattttttgttaacgatagcacatgatttctttaaaataccaaaagccttaataacaggttctggcataacttcacggacaccgccaatcttgaaattttgaaaggaacgttgggtctgggccccccaatatttatcagcagggaccttaatttcaccgaaggagtcagtttcaattctgaaattgtttgaagtggtagaggacattcggtaggtagaaatgatgttcggatatagatgtttgccacggactgataaagtagcgatgtttttagagattcttaacatatctttttttattgtaaaatacaaagaaaacaaaagtaataaataagtagaaataaagttaaaaaaaaggaaactaaaagggggaagtgacagtgagaaaaatatataaacaaacaaacaataatatacacagtctaaaatactagggatattaattaatatgtaatggatagaaaacggttagttttgtaaagaattgcttctacagtgaataattatttataagctcctatcttttttttttttttttttattagttctaacttattctcgatttaattttcaaccttttccctgtctgcgaagaagaaaaaggaaaagagaagttagattaaaacaaaagttgaaaagggaacgtataattcaaaacgagaatacaaaaacaacatcgtgagtaatcaggagtaggaagcaaagaaagaaccagtaatcacaaatagaccaccacgtcgtgtaaaatgtggtttccaaaccacctgtatatatacttgtatttctattccatgcagttgagcatcggttagtggacaaatgccaacgcacatcacaatctatggcaagttcttgaagaagacggtatatgaaaaagagggatggaaaagggaatgtagatggatggatattaccattttaccagcaataatattattttaactgttttctttctctatccctcctcctatagtcataatgataacaacaacaacaacaacaataataataatactaaacgttcattaaaaagaggaaaactgaatacggaaatgaaaaaggaaatctcgcagttcattgatggagttttttgtttttctttctctttttgcgatttgttattcttattactactattttttttattttttggatttaatttctttgttaaatgatggtatattggaccaatgaggatacgtgcattattctacaggcttgttgtgacaacaactactgtcactcaaacacgaacaaacataataaacaattatcaccttttaatcaagccttaagttgtgttaccaacaatagaaatataccaattcacaaaccgtcatctattcgtacttggtcattgcctactagaccttagaagcaaagccgatgacatagcagctgcagtcattgttagtaaaaaaaaaaataaaattatgcttatgattattcaaatattacatattttatgtacaatatacatatacacatacacatatatatgatttggttgtctcagtatcctttgcattcaacgtctacgagattgtggtttgctactatctctttctataacgttcccggtaaccccaatctcttctaatttctcttcttcaattcttacttgatcacgtctttcccaccaacggtcttgacataattcaaatgatttgtgcttcaagtgtttcccacgagcatctctattgctagaaatagcccattccaaaaatttaggacctgtacggatgtagaactcacgcaaggactcaaagggctttggatgtggtaaccacggtttatcgtctggaatctccatttccgattcttcatcttcctcattgtcttcatcttcatcctcttcattttctgccaccaatttctcatctctgatctcttcttcactgtcatcctcatcatcatcgttatcatcatcatcatcttcataatcggattttggttcaccttctctttttgctgcttcaatttctttcaaatcttcccaatatactgtaacaccatctactctatttaaatcaattgaataaaaggaatccacaatgtaatctttgtcaccatattcccaaataccaccatatatgtaaagagaatcgttcattactgtaagagatgcgttgaatcttgggtgtggtaattgagtagacacagtgaaactaaaactatcaatactgttgtcttctttgtcattcatcatatcttcctctacttcagcatcatcctcattactattagacaaattattctgttccagaatcttattcaacagttcctgcaattctctttcttgttctttagatacattattatttgaattacttttagcatttctatcacagctgtttttgctctttcttaagctcaaattataccatctattggactcaacgttataactaaaaagatcattgtagtattccgattccattgattcctctgtttcgtcataatcatagacaccaccaaacataatcccacggcccttatggtatgccatagaacaaccaacacgtggggatggttggaaacctgtccttttacgtctctcccaacggagagaatccacgtcattcgcattagcaggcttcaagacccagtagtctgtcaaaattttacccttttgcagattcttctttgcttttatcttacaataaccaccatagaccagaaccccatcgtttggattagccaacgggataaaagaatgaccagaccgagcgtcggggatggaaagcgtctttgggaactccaattgcctccatttatgtgttgtgatgtcgaagacccaggtgtcatccaaatatgtggtatgcgagcccaaatcacggaacccaccatagagaatgaaatagtttttccaagtggtgatacgatgacctgaccgtgcagaaggaccaaccttggattcgatcttggtccattctttagtctgtgtatccaggatccaagtgtcgttgtaatggtagaatgtagattgttttggggaagaaaactcaccaccgtgtaataatgcgatcccggaagaatggcaagacattgcagcagaggaccgtggcattggggaattttgtgaggtgtatcttttccattggttattacttttagtaaaggtatacagatcgttatagaaaacagtcttgccggtttcattatctgtgtattcccctccaaacaatatgatttcacgtttggaatgcaatggattagtcaccatacaggcattaatcctcttgtttggtttgtccacggtctccacattaattttttcatatttttcctgttctaatttgaattgggctagaatagaatctaagtccacgttgtcttcattatctgagtcctgggcacttagtttggtcatcagttttttgttcttggccgctgccttttcttggtttcttttatttttggcttcagcacgggccttcttggcttctttatctttcttattcttcttagccatggtgtgtaacgtaactacttttatctatttatccatttatttatttatttatccacctaacctggttctcttcctttatttaattttaatttataccaattgaattaacaatcacaaaaaaaaaagaaaaggaagaaagacaaaaaacaggagataagaaaggtttaaatatggtacgctaactcttctaattcatcatctgtagaaatagaaaacgaaatggtaagtaaaacagcaattgtataattttaagaataggctactaaagaaaaaaaaaattctctttttttttttcttgtttttccaacctcatcgcatttcatcgcatcgcatctcagatcttgttattttccaaattttcgacgctcgaaaaaataaaataaaataaaaaaaacacaaaagaaaaaaaaagctcacggatttgcaacggattttcgacggatttctctcctgtgcgctttaaccaataaatgttttcatttttttttcttttgctgtgagaaagagaaagaggacatccgtacaccacaccaccgttgctgttgttgctgctgcattttttttttttctttttctttttccagtttcctctcctatgagcaaagacaaagacgtttttcttttcattttaaccagtcaataacaactgactagcaagtaaatcgacttccctatgtaagttttgttttccaagcctgttactgaactaaattacttctcattataactgtgacaatacacaagtacataaacacatattctctctgttcttctctccctttcccttcccttctctttcattttctgttttaaagaaacaagaaacaagaaacaagaaacaaaaaacaaaaaacaagagtttataaaatgactgctgcttggaaatctgcaggtttgacttattctacatatctggcattaacctctcgtcttttaagaaaagctttgaaaccagaattgcagactgctgccgttaaagcccgttccaataccgaagccatgttcactgaatattctgaaaagggtaccccaaaggctgatccaacccctctacaacctcatcactaagtttctaattctatctatattcatattacaattacttcaaaaaataataaccctctctactatcgtacattcaaaacggtttgaacattcatgatccattaatcatttcatttcatttcgtttcgtttcgtttcgtttctttttttttttgatttattcatatttaatttttactgtccataaataaaatcatttttattatattattattatattatattatattatattcttatctgtctctacatacatacatacatacatatatatatatatatatatataactataacaatacttcatataaattcatctaatattatactatattctttttcaccaaatcccttctcttgcctttgttcctttttttttaacacaacccctttcaaaatagaaagaaaaaaaaaaagcaaatgtatgaaaaatatcaataccttatagagaagagctatacaatataataatacattcatactttgatacatataaatacaaaattaagttatacttaaacaaacatacatatatacatacatacacacacacacacatatatatatacatatatatatatatatacatatgtctctttattcatgttttctgaataaatgtagaacagttaccctaacataacatattaaccaaaaaataactaattactctatcaaatcataatattctagaccataatggtacaaccatccgtttttttacttaggtaccatatatcctctactttccattccattcataaaattaactttaaagttaaattcaaacttaaattggattcattttggatcccatctcacaacttttccattttgaataacaaatctttgaaactgaatgttcctgataataactccgtattaaaacaaaacatactcacttctattaataaaaataatcacaatcgtaactatttttcctattatgtcaacaacaacagtaacaataacaatgacaacaataataatatcgttcagttaaaaaaatattccaaatcccagttttcccattctcttcaaccaataaataatagtcgtgataatagtacaatcactaagaacacttctatacaaaataacaataacaatactaccgctaccaccacttcaagaaataaaaaacttcgcgcaacattagataatgaaagcaaagatttatggagattactcaagttaattaaaaatgattggagaatgttgactgtggctctgtctcttttgacattctcatgcgccattggaatggccataccgaaaattatcggtgtggttcttgactctcttagatcatccgatacaatagagtctttacaagatttggtcatttggaatggtatacatgctccaatgttttttggtttgactttggctgccctttgtatcggttgtatagcaaattatgcaagagtaatccttttacggctcctaagcgaaaggttggtagtcagattaagagctaagttgatgaaacgtatcttacacatggatgcgaccttctttgataaatttaaagttggagatttgatgtctcgtgtaaataatgacgcattcctagtatctagatcaattactcagagagtctcagatggtgttaaggctctagtcatgggcacagcaggcataggaatgatgttctctttatcatggcaattatcctctgttttactaattatgatgggcccacctctattaataagttctaagatcatgggtagacatattagattgaattctaaaaaattacaagaatcaacagcaaatttaacaaaattgacagaggaacaatttaatgggattaaaacaattcaaagttttgtagcagaaaatagcgaattacataaatttaatcattccatcagagatatcttccaaattggtaaaaaattcgcttttatcaatgcaaagtttttcacaactgcttcattgatcagtgattgcagtttcttaattgtgttaacgtatggctcatatctagtattaaatggtttgcttactgtaggtgatttgactgcttttatgctatataccgaatatacaggaaatgctattttcaatatgtcaaatttctattcagaattgatgcagggggcaggagcagcaacgagattatttgaattgacagattctgtaccacaagtacattcaacaagaggagcaaaattgttacctttaaaagcaagttcatcaatatttccgtcttcttcttcttcttcttcctcagccgccttcacctccactacagaaatttctttgcctttatcttcaacaaagaaccctaaatctaataccccaatgacagcaggatctgttgagtttcaaaatgttacttttgcgtaccctacaagacccactgtgccaatatttaaaaatttatcttttaaaatcgaagctggctcgaattattgtattgtcggaccttcaggaaagggtaaatcgacaatagcatggttgttaattcgttgttatgatgtacaggccggtcgtattttaattaatgaacaaaatatcacttcgataaacgccaaatctttacgtaggaaagttgctattgtccaacaagaaccaatattaatgtcaggaactataagggaaaatatcacatatggactagactatactccaacaaaggaggaaattagatctgttgccaaacaatgtttctgtcacggtttcatcagaaaattaccaaacacatatgacacaatgataggtccacaaggaactttattaagtggtggacaaaagcaaaggatcgccattgcaagagcattgattaagaaaccaagtattctaatattggatgaagccacatccgctttagatgtggaaagtgaaggtgctattaattacacgtttggccaactgatgaaatccaaatccataaccatcatcagtattgctcatagattaagcactattcgtaggtcagaaaatataattgttttaggaaacgatgggaatgtggtggaaattggtaaatttaaagacttgtatgaagacccaaacagtgaactatccaagttattaaatgaaaagagtctaccaacaggcactaaatcaaacaaccatagccatgataatctgaactatgatattgataataatgatcctctagctggtaatgacaatataattcaaacaaatgatgcaactgtagttaaacagcatcaaaagaaataccaaaaaactttaaatggagaagaccgacaacaacaatctgatcacaaattaaataaaaatttaagaaccacaacattacaagaatcgaatatgacagaaaatgctgatgttgattctgaattggccagattagaagaattggaacaagaaaccatcaaagaccttttgaaagatgtctccaatgaaacacctatcaaattaacaacaaatgaataatcaattactaaatgtaccctatctaaacaccgcaagaagggatatgggtataaaataagtcaaaacaaattaccccatcttcatggttccactgactcctacaataactgtccagtttcgagaatttggaaaacacattgaaccttttttatttgtctcaacataaaacgcgaagaggaaaaaaaaaacgaaaactctttttggtcaacaaaaggggaagaagaaccaaaattgggcaaaatatcaaaaatgtaaacaaatacaggaataatcgagaaatcttttgtagatagatattataccttttattgatgaagggcacctttcataatctcttcatggcattgtatgctaatacttattaatcaattcgcttcttttcattctatttttaagaacaatacttcaactttaaaaagcttttttttattgttattttttggtttattccaatagtatatagaagagactagaataaataaataaatatacatatattcgcatatttgatattatcattagtgtatactattctgttcttttccttttttcatttttattttttttacatttctgctatcagtctcttagttcttcatatattacaatattgtgtgtgcaagaaatttatatttagatattccaggagatggatgttcagtctgcacgtaatgatttacaaccatgtttcaatagacttaaaaatcttttaaataccttagatggatatacaaagtatgactatgccttagaacagcagttacagtctttaaaggatgacttggaacttcttaatgaaattctgactaagctatttttagattgtaaacaaggaatagcaacagggaatttatctattccatttaataattcaatattacaacaaaatttggttattatagatttgattgatgattctgataagtatgatatcacattctcccatcttttggatataatggaattgaatgaatatgaaaatcattttgatataattattgatttaatcgaatcttgcaattttgcaaagaataaactacaatccttattgaccaatttgaaaatatacatagatattatactggaatatcacgaaatcttaaatgataatatgaaaacattagacattatcatcaataaaaatattgacaatcttttcagtttacaagatattaaaaatacgtctcctatgagacatgtaccatcttttacgttgaaccaactaataaagattctgtcaaaagactatccaacaacaattccacttagtactaatagcaaggataatatcaacgcccaattaaaattacctaaattttcacccatggaagaaaaattaataaaaaactttatgaaaatccaaagtgatttaaaacccattgaaacttcgttattggaagtcttaccacaaaggctacagcaatttgaaaaaagacatcaatattcaaacaaaggcattgatattcttacactaaatcaacaattgaaacgctcctataaggaactgttccaaaactttaaattcttaaattctaaagttaattcattgaaaaaggatttaatagataaacgttggaatattatttttacaaatctaaatcatgaactagaatttttaattaacgagatggaaagaaattatcagttattagtaagatttcataacaacactgatgtaactagtgataacacacaatccaactctttgaatgaaacaaatttaaatacagacggcggtatagaatcgtcgttattgtcaacctcggcatcatacaaaatatcgaaacaattaacacttcaaatggaaaaagtaacaacaactgtttcaaaaacttttgatgttatatatgcagcagcagaattttctcttttagatgaaaagattgcaaataaaaccaacgagttagcgcgaaactgggtaaatctacgcccccaaagtgatcaattaatacttatagttaaaaacaaacttaaatcacaacagcatataataacagaaactaagacaaaagtaccgaagaattgtgactcaagtttccttgatatcgaaactctagaaccacccccgccgcttctttcaactgcaagtaaatcgagacggtcaagtaacaattcatacctatcgcatggatcggatagtgaaagtgatgttggaaatagaactattgaaactattgtgaatgatttacgaaaattttctatagccactacaacaaatcttcataacaacaataatgccaataaggaaaacgaagatatatttaccaagcgaagtcaaatggatgcaaatatactaaagaaacctattttgaaatcaggttctttacaaaacgatgatacaaaaattaccactctaaagagtggagccaaattgttggagaaaatgcatataaaaccgattattgtctcaacctctattgcagaatctgcatccaaagatattgataatgaaaataacccattttttgactcgcaaagtctcgaattaacaaagttccaatcagaacaccaatctaatactagtaaaaaaacacaaagaaaaaaaaagactagaagtctcattttaagtactcttccacctcttatccataaaaccaatgagaaggatattacaaaggatcaattcccacctctattaaaagaatcaatgaatcgtacagtctcttcatcgttaacaatattagcctcaccattatctttgaaaaatacctcgataaatgatgagatgtcgacatcatatataaattctactattaataataatgaaagtgattttatggattctactactgtagaaattgtagagtcaaatgatattggacaccattcagaaattttgtccaataatcttactaaaagccaaataactgccaacactccaataagacatgatatttgtgatcaagtcttatcacagacagcagcatctactgacgtaaataatggtacaaaaagcatgaatccaaaggtacattctttttttacatcatcttcttctacatcatccattagcaaaaatgatatgttagatttttgtaataattcatcagaaatagcaactccaaaaagggtaactttaccccagcaagaagagttaattacacatatttcaccagaaacgtttaatcaactgttgtgtggcagaattgaaattaatcaaaaaaaaccttctttaattccacatattcaaaacaacaatacgtatttctcaaatgaacgtattaaacctataagtttaccaaggaaagggcataaggtttttctatctaaaagaattccaacacctacacccttatctcagttattaacacaaagttcacaaaaaatccttggatagaataatttaatgcatagattaaagagatgtactcattgtatcacagaacatatcatattttagcatttaatcattcactgttctctctataattcaattcccacatcctactttctttttttgcatattcacacttataaattttaactgtaggcattgataaatataaatatatatatataacgtgttgattattacctcgcatttattccgcttcaatcctgtatcattgtgcttctagaatgtagtttttatatagaccttatcgtcttgcctatgtcaatagccatttcgaatttgtttagaagatggaaattagggtttcaatgctcttttttgaagatctgaaattttttgaatcaaaaaaaaaaaagacacgaaaaagaaaaaaatctataaatgtgtcaataatacaggcaaaacaagatcatcaatgaaaaaccataaagattaaatcaattgtgaattgataaaagcctgtggcactttttctaaggaataataacaacaaaatttaaaagctgagattaatacaacaataaataattggtggtttgtattgcaatattatttgaatcaataaaaaaaatatcaaataaaaaaaacagcaacattacttatcaaaactttatctggaagttttctcatatccttctacttcttttcttttaaacacaaaatttaattaaaataccttattatgtcactcataaaagaacctcagacaatatatgtggaagaaactgaaagacatgatgtgacgaaagattccttatctttagtttctcctgtagacacaaaattaaacgtaactgtaagtgagaatcaacatataccttcccttaatactggaacttcattaggcccacttactcatacaaacagttttagtgacatatttaatgtccttaaacctgaacataatctgctgacaaatgagctcttcaaattttctaaagtattacaaactaatggtgtctacttaacaaaagtcacaagatcagagcataagttatattgttttaaattaaatcaaaacaatagtaaaattttatggaaatccaatgtaaaatatatatgccttgactctattaaagacattagaattggccatatggcaagtaattatatggaagaatatggagtgacctttaataccaaatggattactttattatatattacaaacaaaaagttgaaggtgttccatgcaatagctaaaacagaagaggattttcatgttttttatcgatgcatatgtgggattgtcaaagtacgaaaagatctgatggaaagtatgtcacttcctgatcatgaaaggtttgcacaaatccattggcataatattgtctcatttagcaaagatgatcaattgaaagatactttaacatttgaacaagtaaaaacactttgtgataagttccatatttattgttctgtgacgcatctaaaatcgatctttgataaagcaaacaacaatcataatcacttattaaattttagtgaatttcaacactttgtaaaattgttaaaggagagacatgaacttacagaaatttggaaaactatatcttggaataaaaagactattaatttactacaatttagtgattttatgcgtacagtacaaggagaaaaagatatgacagatcaccaactacaacaagtttttaatgaatatgcagaaaatggcttgataacacaagattcctttactagatttttaaacgatcaaccatacttgcatgatatagtgcagtctactgattattcaaagcctttaaatcattactttatcgcatcctcacataatacttatttattaggcaagcagtatgctgagactccctcagtagagggttatgttcaagccttacaacaagggtgtcgttgtgtagagattgatatatgggatggagaaacaggacctgtggtatgccatggtattttaactgcatcaatccccttattaaatgttgttaaaattataaaaaaatatgcatttattgtatcgccttatccattaattctctcccttgaggttcattgtaataaggaaaatcaacaacgtatatcacaaatacttaaagagactttagataacatgatatacaatgaatttaacaaaaataccatgaaaagcttaccttcaccaaatgatttaaagcacagaattatcatcaaagttaaaaaaccaagaaatttatttacaaagaacatgaaccctaataatttaacagatagtacttcgaaaaattattcttcctcatcaatctatgaatatacttccttttcatttagttcttcaaatgattcagaaattgattctattacagatatgctcatgaaagaaaaaagaaacgatgatgtttcccaactgaaattaattccaaatgtgaccacaactagtatatcaagaataaaaagaatgggtttgaagaaaaaagcagaaatttctacttcaatatttgagatttcaaatatccatggacttaaatttagaaacttttctttacctgaatctaaaacaatcgctcattgcttttccttgaatgaaaaaaagtttgaatcactacagaaagatcctaaccaggtgttatctatggacaagcataatagaagatttttgatgaggatttatccacactctttaagatataattcaacgaacttcaatccaattaaattttggaaatctggtgtacaaatggtggctactaattggcaaacaaatgatgttgggcaacaaatcaatctcgcaatgtttcaatcaaccaatcaaaagaacactttgattcatagtggttacgtattaaagccagaaccattactacaaacggtttctaagataaaagaaatacctgagatatataaccaatttaatcaaaagaacttgaatgggtattatatccaactaaagatactttcaggacagttactaccaaggcttaaaaaggattctaaaaccactaataattttgggctatatgtgtcagttgaatttattactgatgatcttaacagctcattgatcaaaccactttctattattaaaaatggaacattgatatctgagacaagtgcatattctttgataaaagagggtaacggttttaatcctgtatgggacatggagttaagtattcagctaaagaaattgtactttgtttttcttcgattagttgttaagaccaacgatacgtcacttgctacatgttgtataaagttggactatttgaaaagaggttacagacatattccactgtacagtttggagggcgaaaggtatatcttttctactattttccttcattcacaaatttttccagcatcttaaacagcatattacttttcacaaacatttaattatgatacttgcatatagtaacactctacgtgtaataattggtatatatattctaataaattactaattaaactttctataataatcttagctctgtatctggataaatttacacatattttcacatattgtatcttcttttccttgttttcaagtaactaaaaataaaaattgtagttatgataacttatttgatttctatcagaaaaagtttattaaacctcaaaaaagattgtaatcaattgacttcttcttattatcaaatataatagtacataataaccagtagtacgtgagatgaaagtgcatccaagaagaaaatttgaattttacttttttggacaacgagataacatgaaacaaaaaaaaagtatctattttacctcaaagaaagactatattcttagtgaacaaataaactcattcaataactatgtgatctacctggaaagtaaccatctcataatatataaatatttgatgagatctgtattgttttaataacaataaaaaatattgcagctaatataatatgattatattttttttgataatagagtctactaatgctaaaacaaaaaagaggaaaatagtatacaaaagtattgttaggttctattcatatttgctattatttcttaaaaaatgtcttaattctcctcagtgtttgttcatagtttctaatattttattatacaaaaaacaatatatcataaacttttagaatattgttgacgttttggaccgtaccatctcaatgctgattactatgtaatcttctagttatttatctaattgttgaatagttctaaacaaaactgtagccaatacaatgattttaactagtatataatagagaaaaaaaatccctaggataacaataaataatactataaaaataataacaaatttatatttttttgcaaaccgtgtaaaaaattgcatcaaaatgaactaaaaaagcattctcatactatgttatcccagagatataggctttcacagaataatagattctactcaaccatgttaattataccctatttagaaatcaatggtggtcatttttggatagcaaaaatattcagttgattttataacggcttttaaaaaaaaagttgagtatatgatatggtgacagataattaacaaatgttggaatgataatatctatgacattatacaacaaaagacaaaaaaaacttttctttcatagaaatatccgataataattattctatggatttattggacatctttttggaattaactgagcatttaaaatatttttgactggctcttctcatagattattcatttcgtgtcttcccaatcaataatagcttgagttggatactaaaatattttttacattataattatttaacattctataacaaaattacctttgtcttaattcaatccccaaactcctcgtattcttatcttaaaattaaaatattgtttctttaatatataatagagacacgaaatgttagaaaaaaaatatcttactttattaatcttgaataagataattaaccactaatttttactcatcccatgctgctattcttaagataatattaatcaaatagtttaaaaacatgatataaaatcagaaggtttcaggccagtaacagaaatgtttcagaatagttttaaaatgaagttaatataaaaccgataaaaaataccaagtcttttccaagatattcttaagaaatagatatcataacaaaatgttcgaagagaatattaagcttataatgaaaaatggtaaaactatagcaattaacaaaattaaaacaaactcctatgtcatgtgtgaagatggagacattgcaaaagtaacggctatgactagagatttacaaaccacttatgaaatagtccaagtcactaaacatagggatgaaacccatgtagaacgaccaatttttcacagaatccaatttaattgttccttaggacatatattagagttaagtgtacctagtataccaaagttggaaaaatctttgaaacatgagagatatcttgtgaaaataaaaaaattggttgatttccagaccagtgatggtcgcattattgtcattccaaaggataaattcgtaagttttcctcttacaactgaaggtgaataccaagctagaaattatatggagacagtccaaaaggaacagccaacatacattgactttagacttgaactaagagatatagattatttaaacagtcatatcagattagcaactttgatgaggtatagtccagtaataaatggcaacggtattttatctgaattcttaacaggtcaaaaacatttaataacttcggcagtattaggcatggcatggttgcttggtttatggattggtgacggaacaactaggcatcctgaaatttccatggacagtcatgacatttcactttggcaaggtctattaaagaacgtttcaccttggggtctagtaccaacctataaggacgcttgtattccattaagagctaaacatgtaaaattatattatggaaatgcagattctaaaaggaaacaccaaatgttcagaacaaataacccattctggaagtgccttgtgaaactggattttaaaaataaagaagatggtacgaaaaaaatacctgaatttatgtggcatgatgatattgaagtaagagaatcatttctggcgggactaattgatgctgatggatatgttgcgtatggtgagaagaacggtgatgtgtttggcgtttctattcaaacaatatatccctcagttatgaatgggattataaatgtagctagatcgttaggtataaaggcttctgttacaactaaaccagaaagagaaaatatcatcgaaaatagagtagtacaatgcaaattcacttatgaatgtactcttgttggagaatctacgttacaaaatgtgttatcgaaatgtcaaagtggtcacaaaaaaagacccaaaccggtcaaaatttctagagaacctattagatttcattttgaagaaaggaaaagaggtttaaattgggtatatggctttcaaacagacaaagacaaaacgattttattgagtaactatgttgttgtgacatcttgtaataatcatcattgtcacacagaacagaagaaattttctcctgatagaaatcttcgtcgttgtaaagcgtgttccaaaataaatgcaaaatgttgctacaaagattggactggaaggcacaatttatgcagcagatgtagagctcgatacgttgtatcaggctatagatgtcttgagtgtcattatgttccagaccaaagaagtattaagaaattgaaacgtaacgatatgccgttaaggtgtgatagatgtcagggatcttattattatgatccaattaggggacctattgataataaaatgagtgtactgccaagtccctcaaaagagcaaaatccaaataaaatctcatgatcatctaaaaagagtaatgtacataaattatcattcaattaatccaaaagaagaataaaagtatagaagaataacccttaagggagattacactggaaatgggaaataatagggaaaaaaaggaggaaaacccacaattttttttcttttaaaatgatctttatatgttaccatgtaatcatgatacctttttcattactaaccttcttctttagatagtttacttatcataggctttgtaacaatatccaaaaagtattattcatagtagtatgttgaaaatagatatttgaataaatattataacgtgactgaagcatatctaattgtctccaattttatattattcctcagtttttacgaggaccatattttatcatctgttatcagttttattattatatttttttatatagaacttgtattcttacaaataattaatcctatcgttgtattaactttgtataagaatgaattatataagcgttcttttagtcatatattatgtagaagaacgtgtagtattatacttgagagtactttcttaaaactttctctacgtgcattctttccagatataactatgacaaaaaaaagattgatttttttctgaaaaaaaaaaaaaaatgggttttaccgatcagtgactctccatattatgcaagtaacgagcagcatggtagataaacctatattgatcactaagttgaaccatcttcattctttgtgatcttaactgtaggactatttgttcaattaaatctttatcgtattgggatttggtggatttcagtagatcattgttagttttctcagaaaaatcaactgtattatgtattaaatggtctagtgcaataaaagttccagacctaccaactccagcagaacaatgcacaattattgggtcctcgcctgagataaatctgtgggaatgctgagaaagcttcataattgggattatttcctgaggttttttcatatcttcccactgatcaaaataaaaatgatatactgttttgacaggtaactcatgtttctgtgtgttgtcttcattcttaggtatcaatttcaatatagttaaggtgtattgatcgtcaaaccgttttgcactttcatatttaacttctaaggattgcttaaagatactcagatcttcttcatagccagaaggacactgtttataagacacatatcttttagtatcatggtattcaaatcccattggccaataagggaaacatttttccctacttttttctatcaaaggtgtcaccataacaattactatattgttgctatgacattcatgataacacatttgccaaaattgaccccatgtattcctggttggaccttgtgttgcaatataatgcccactagagatggattgttgtgatatatcaacgtttacataggacgcattgatataatcattaccttttgtcacatttaaatgtactctattcttttcatatggcataatattaatatatctgttccgaaaatcgtttatttctttaacgcttgctcccaatgaccattttgattgctggtcatgttctcttgctacctctcgaagtcttttatcctcttcttgttgaatacaactgaatttctgatttagctctttatcgtttagattcaaataccaaggatctcttctcatgtttaaaaaataggtaatattgatattaacaaaaaagatatatatatataacaaatggagccaccttactatctgattgaataacctagttcaatggatcattctaaaaattttttttaaaaaaatattcacaaaaataaaaaaacaaatactaagttaaattatgaccatatttgtatctctcaaactttaaaaaaactagtaacaacgaataattcgaaacaagttttcatccttaacctccattttttttcatacgactcattagacgatttaacaagctgtgcaacctttcaattttgatgatgaaaaacaaaaaagaaatcgaaaaaagattcaaaggaaaataaaggagtcggaaaatttcaagactgtttttcctaaaatggcaattttcggagatttgtttttttttttttttctaaaaataaaaaaaaaaagaaacataatcaaaagtgaaacaaaacaatttgataaaaacaacaattgttaataaactacaagactgtaaaacaatcaacaatgtgctacaaatcaaataagaagtcccataagtatagtttctacttattctggtaattagtaggtgtcatttggcaccaaacctgaggttttttttcgttttagaatcgtctaactttaccattttgtatattgagaactataagaagctgatacaataaaaatttcatttcttctctcttaactaactttttaattatttgtatctccttcaaggatatttaactattttcatacattcttttggtttttattttttttttgtttaaatttctaaaatatttttttcgcaactttttctattaggtattgaatatgcatattcaaatacattagttttaaaaacttcttggtcatcatctacacttcaaatctaatttataaattctttattattgattttattatatattccgtcttcaaagtcaaaaaaaaattatcattcacatggtcttcattggagaaacaaattaatgtattttttttctttttttcatttgcacattatcttcgtgatttatattgtcagatagaaacagagctattaatacatttatcattttgaaatagccgagtatttatgatggtaatgtacacagtattaattgttttaaccacaactattcaaagagattactcccttagtatttaacagtgctacataatgatatttattggaaccaaatgaattaaaataatgtcctattagatacttacacttcagaaaaaaaggaggtaaatttttgtttctcactagaacaaaatcataaaatcaaatcaactcttgccttgtattttccattagaaagatttacttttaactcattcattaaacttttttgtatatttcaatatcataattgtccaaaatagacttaatattattgagatttttcaaaatgttagtaggataattctagatatataagattgaatcaaatttccattcatgattagcaccaacattacatgatccagttttatgtacgttaatttttattttttttaatttgctatgttttaacaatctaaagtaggacttaactaatagattacttattcaaggaatataaattttctttgctctagattataaggaaaacttatataaagttaagtatctctaaatagggtattggaaatatctgaattttttttatttcaaactactctatattacatggtctaaaataaatctatatctcatgcatctaaaaatccaattaatctgttaccacatgtaaattaagttccaacaattatattttgtgttattataaaacgaaatttttcattatttgaatgaattattggttaatttaacatgtatgttattttaaatcatagaaatcattagatacaatttttttttcaaacgataggtagcattacttaaaaacttagatattttaagcattgtagagagacggaaatgcttcttaaagttttctacagtttttgctcttgttaaagaagatgttaaaattatcaacaacatgacttctaaataatagtatatatattccgcaaaaaaaaattaaaattaggatattctattgaaattgtctggtccgtaaacaaaaaaaaggcaagagagacaaagacaggggacatcaataaactctgtcccacatgaaaactgtagacattgatacctattaactcatatctataaaatatttattgaatcaaaattaaacataatgttcagccaacgtataaataataacggagtacggttggatcatgatcaagacaaaacattttctatctctaagggttcatataatcatcaatcgtatctatccttactagacttaagaaataagaatcaagatcataaacgacatatcaaacctactcaggttccacatactttatctccaaactcctatacttcttcttctcaactacgactaaaagaattaactgatagtcataattgggatgaattagacgatttcgaattagaagagttaagagatggattctttgatgctatttttacaaaatctgagaaaaaatatttaaatattgatgatatatcttatctagattttccaaatcaattttctcgtgctttccatataaaatcttctgatttgacacttttctttgaagattttaaggttcaactgattcaaaaatggagaataattattaaattttttattcctttcttcattgcatttgtattatgtgtgatcagacctgctggtagttggataggccatgataatcgatttttttacctatcggtgttatactgcatcatccagtaagaaatattggtgttcaattggaaataacaatattttcaataattggaatgatatttgctttaggttggtcatctttagcatggtatgtttctaccgcaacgggccctacagccagtcatcaaggtggtatattgtttcagagtcttgctatggcattgacctttgccatatggtttaaaacctattatcaaagattcttatattttagtttatcctttggtataattattatttttacacactctgtatcattagtattttccaagcaagatttacattggttactttttagagacataactctttcctatctatttgggatcttgttatcactatttacttgtgtccttatctttccccacagtggtaatgaaacattaattaataatttcagagatactttgatatctgcaaagaaatttctggttgggttaattgataaagatacagtcgataattttgaccaattatttcaattaaaacaagcaatgattgaatcgttaaccatcaaactatcaaaaagttatggggacttttttaatcaattttcagtggcaagatttgatagacataaactgagagaacttcgaaatgctttgactacattttatggaccattacgtgtcatcccacttcaaaacaaattactggataagaatatgttgataaaaatatatgatactctaaataaacaatcaggtgatgctgaaatgaataatggataccccactattccttttacggaatttaattctgagccagaaacacctagaacttatttaggtagtgtgactcctaggcaaggaataatattaggtgcaaatgtctctccatatgaaaatttttacatatcaatcatgcaaaaacaatttggcaaaagcattgttggattgattgtggaaatgattattgctttggaattattggatgaatcgctaacagtatttttaaaatatagcacaaagcaacctcaagtaactgaaatcaccaagaaaatagaagatactaaattcaagttgaaaaaacggattaataaattagataagacttataaagattttacaaaatctaatattttttcaaacgatttattaagtaattcggagtgtgttatcatgtttgtgtttttaagatacttaagaaattcttcaaagcagttattggcggtcctagatgcttgttatgatatgggagtaggcattcattggagactacaacgaccacattatccattgaaaaaagctttacatagattacctaaacaatgtacaattgatgaaggtacagacagtttcttatattattatgataccaaaaaagatgtggaagaaatatttgaaagggtgtacaatacatatacttccaaacatgcatatattaaaaatggtgataaaaaaaaatctttaagagctattgatcatgatgaatttaatcttcacacaactcataatgaatttcgttacaaaatatggaaattttccaacatggttactggtttcgaaatgaaatggtctttaaaaatagttttctgtattatatttttgtgcttacctacatggttacctggatcttataagtggtaccaagaatttcattgttggtgggcagcacttatattttatatgttggttcatagaaaacctacgggtgggtttcaaagattattgattagattaatcatatccattttttgcatgttttggggctgggctgcatgccaagcaaggcatttctgtaatccttacgttatatgtacttttgcaggaattcttgctgttccaatggctattaacttattaatctatcgaaaccctaaaacttcttttgctggtttaattagtttcactgttatttccctgcaatcatataatataggtaaggacgatttaagtactgcaagaatttggaaaagtacatgggttaccagtttaagtttaacaattggtatcaccgtatctgtttgtattaattggatattttggtcatacaaggcaagaactgaagtgagattagctatttcttcacttttatcatatttgagtcaatcatatcaatcaattactgatagatacttatacagagacttagacgatcaacctactgaactgtcattatcttttggatgtgtacgagaagttagattaacacaaaatcttgaggctataagaggtttattaaagagagctatattggaaccaaattatgtttcaaattttgactatacaaaatatgaaaaattaatagattcctgtcaattattaatggaaaaattgatcgagtgtagaatatcaggattatatttccaaatttgggaaaaagataaaaataaagatgcaactagagctttgttatcattgagaagagatgcagctgcatccgtaatttttgtattttatgtattgtctaattgctttcgctcaaagaataaaatacctaaatatttgccaaacacaataatggtaaggaaaaaattgtttgattgtttaactaaattagatgaacaagatgagaagatgaatgaaaaagttaaatatgataatctacaaaaaaggttgtttgcaaatagaaatgaattttataatgaagtaaacacggacaaaaaatcaacagttgatgattacaaaaaactacattggacagaagtttatggtatggtatttgcaagtgcatttacagatgtctcagaagcagttaatgatttagtggattgttgtaaaaatattcttggtgaagaaacttgttgatattgaataaatttccatcttatatataaatgatataatagaacaatgaatatatatatttgtatttatggttataatcaatgaaagtttctaattaatctagatatgtatgtaccaaaagaagggagtaattcttaatactttgactttttatgcatattatagttattataattattataattagtattgttaaaaccatccttattatttgtggtgttcataatggggaatcagaatagttttaagtaaatatgatcaaatatcagtttctcttcttctctttcaaatagatttctcatttttgtgataaacgacaacactatttttatatctactttgagagatcctattatcttactttttaccagctcttgctatagaatcttgctcatttgtaggaagctgaggtaattttatacatggttagttactgtgcatttgttgattgtttgtgtttaactctattgtttagtttatattgggatttactgaatatctagggcttgtaacatcatcaccttcagggcttagccgactattattttgaatattggtattatgcatagcgtgcatctctgaattcgaatcgttataatttttctgaacataagcttctaaggcttctactggactatcaattccatgaatcttttgatatgcccttaaattttttaaagtagacatcacattacttacttgcatgaccctcattaatccttcttgggaaccacatacagaaacatttctaaagacaccaaaacaggaacgtaactgtgacatagcatcaaaattcggtggaatcttcttatcctttaaatcattagtatttcggtggtttaaattatcgtttatatttttaaatgtttcctttttgtaactgttatcatttaatttatttggatgattgttagcagcagtattcaatctacttgttaactctgagttttcaccactaattgaaccatttgtggatttattctttgcattgctatcatcaatgttgctcaattttcgaaatattctatagcaactttgttgattagataataacctttctaatgcactccattcgattccagggacaaaaccatgcatacaaagatcaccaaattccaatttcaatgaagatgaatatatccccttgaattgtatataataggtgatgtagctcgcatcagcgtaatgatatgtcaaagttgcctttggacaacttatgaagatacaactattacttaaaacttcacatttaatttgttgcaaggctatgtcaattctaacaacacctaacttccataaagttacaaagattactggtatcaaagatactaagaaattgaattttctataatcaatattagatgttttactgtatcttactgttgcatatggtgtaaacatttctttgacaaaatgtttccaatattctaatttattcatgttgttacctgcattattaatcgtattgaccatatcgtgaaactttaatattgctaaatttgaaatatatttccttataggatatgaaaataatgcaggtggtagtggttgcggtcttagtttttcagcatcttggagcataccttctgaaaaaactgtttctccattgttattattagtggtgttggtggaagttgaatttggtgacttatactgtgttggttcattcacatttatgtatggagatgtgatggatgtaccagaaattacaggtttcgacatgtgactttgataaacaactggggtaccacctggattacttactgcttctttttgaagtgattgttgtccttgtggcggttgtatattagtatctgtttgtggattgatggaatgttgttgttgatggcgtgaataattcgatatatttgcattggaagcgtcattataattacggttaatattgtcattatcataactattattagtctcgttgttactattcctattttttagatattcataagaagtattcccaaaattgttgtttctgttattgtttggtgggaaacctctcatatcaacgttattctcccaagaaaacctactctgattataaatagcctgagaattattgtaggatgcggttaggggtacttcattattattgatttgattattttggttcataatatttaataattaaacctggatggtgtttattagaatgttatatatttgactgtttttttatttgcttatttatttgtttctttcttgttatattagtaattaatagttaaataacttgcgtcaaaaaatcagggatgctatcaattgaatagttataatatgcttataaaataaacggcgcttcttgatatctatctatatatatatagtaatatttgttgatactgttattttttgtattatcattaaaaaacgtaagaaacgattcctttctatctatttcatttcaatttatcaatttgccacaatcttcttcttttgtttcttctttctttcacttcttttccccttctttataccactataattgtatgtttatcgttgtcattaaatgtgtcagatacatcgctgtcagttgtatttcttaacattgttaaaaaacttcaagtagttttgcaaagaaaaaaaaatatttttttgtgtctattttttttttctcgagaaaaagaaaaaagaaaaaaaaaaagaacaaattctcgagaaataaaacatccagacaccacagccaatatgttaatcttagagagttacactaaagagtcgtgctatatgatagcgccagtaatgcctctaagtgtgtcatattttgaatcattatgacgtgctttaagatggtttggagtactcaattgtgtttctctaaagtctaagtgaaatgtgaatggatttcttttttaaccatcacacgaataatatttttccttagattgttttttcaatctcgtggacagtaaagaatcttttcagcagcaattattgtacgaaccattccatccgttaaataagggcgtctcggttttcgaaagatagatgttatctgattagcattattattatcatcaccattaatgaatctgtctttgtttgtagaagctttggaattctcatcatcattaccttgttgtctagaacgggtctttcccgcacgtttcttcagtagcttgttgattgtatctcttttctcttcttccaatttcttatcttttaaattcttacgtttacgtgcattttctgctttacgtaattggatctcttcttcggttaacatttcttcttgtttattgtttgagtccgaataatctaggatatcttttaacattctagaacgtacaatccttttagatatatctgcagtagattctttactgtttatatctagactaattggataatcattagtacttgtattttcttcttcctccccctgttcttcttcctctatatcctcaacatcgggcattggggtttcactaacttcaggtatttcaatttcatcttcatccgtatctatatcttcttcttcttcttcttcctcaatagctatctgtcgattgtcctcgaattctatttcattttgtttttctttttcttcctctttttcatcatcatcatcatcatcatccttaattatgggaacaatctcttttcttactgaagaattaacaatatgttcatcattttttgtatcattgttcttttttgaatatattctagtagaacttctgttaattattttagattgtctattattcaacttactttttttagtcacactttctatatattcttcatcttcatactcctcgtcgtcgtcgtcctcttcttcatcttcttcttcctctatataatcatatgcatcgtctttttcatagactgactcttcttccgattcctcatcgtaataagacaattcaacattatttgcattttccactggcatcgatggataattgttattatgattgttggtatatatctggtccgtttgatgtaaagttagtctaaatcaattggtggtatcaacacagtctctttaatgtaaagggactgaggatacttttttctcatctgcagtctatactctgttgacggttcttctaaatctttcttccttttcctcccaaaacgttgatttgaacgattttcgtcttcttaaaaaaaccttgagggttgtttaacacaatgagaaaaaagaaaagaaacaaaaagaaacaaaaattagggttcaagtattttagggtttcgggctagggttttatttcaaggggttgtttttttttttttttttgattttaagataataagccatctctacagaaaagatgcaaaagcctattattagtattaaaatcagtattgaaatagtagtaatactactatttatacatttagttacgtataagaatattattagatttgatgacagttgtgttcatgtctgtagataatatatatatatgtatatatattgttattcactaatctctataaccataactcttcttttgaagtgtttcaaaacaaatcccattttgaacagtttataaatgacagcaagattattgttttgtaaatcgcaggtttatattcatagaagtaaagatgctagagataatttaaatgggtttattattattacacagaattatgaagatggaaataatggtgttgcctgtgctgcaggtccctcaggatctgattctcttctctcatggatttctataacttctttaaataattcacaacgagcttggttattgaaacaggaagataaattgattgagaatgttgcaactaattcatatcattcaaaaaaagtgattaaaatgaactcacaaattcttaattgtgcaaaatccaactctataggttccttttctgtttcattgcattctctttattcaatagaattcagagacccaagtcctagtgggtggtggtacggatcgatattattgcattctttgtcaccaatagaagattctatcttgcctgtcttattcttccatgatgatctatgtccttctaccataaaaagacagagtttattgaaaaaatcctttgatccgttcgctaacactggaaacgtatattggggtggtatcgatcttagaaataaaattagtgaattggtggatttaaagagaactcagttagataagtctgtatggttgattaacgctactttagatgatttaagaaatttttcatcagataaattaaaccaaacagacttgaatagcactagtactaataataataataataataatggttctactatatcagatcaattttggaaaaaatttgaagatacaaaatggtctgttatgtcgcagatcgctaatgcaacttcaaaaacaggtttattggtatctaatttagttaaaaggcatcctgtaatacaatttattgatcgaaatcgtggaaatcgatatataaaacaaatgttagaaaaccctagggttcaagaagttcaaaatgatttcgattcagcaagtatatatttagccaaatgggctctcggtgttaaagaagaagttgataggtaccagttaaacaaccgattgaatgatacatatcggaaattattaacaaaggatttagggtttgatatcactggtgatacaactttcaccccattagagatcaataaagctttggagagaagtttcccattgaccaaaactaaatgggattcatttttcgattcccaaggtaggctttgcattacaattaatgaaataaaagattatattttccatggaggaattgatacaatggagttaaggaaagaggtttggttattccttttggatgtttatccttgggattcttccaaagatgaaagggatcaaatattagcaactttaacggaaacataccaggaatataaaaataagtggatgtttagagtgacgagttttgatgatacagaagaaatggtgaaggaggaagaatattggaatgatcaagtatttaggatcgataaggatgtgttaagaaatgatagaaatatacccttgtatcattttaatacagtagacggtaaaccagataaaccaaaggggaatggaaatgaggatgattcaaaccctgataatgaaaaccctgataattggtcgattaataatccacatctactgagattaagagatattttaaagacatataatgtgctaaataataatcttggatatgttcaagggatgtgtgatttgttgtctccaatatattatgtatttcaagatgaagtcttagcgttttggtgttttgttaaatttatggatagaatggagagaaatttcttaagagatcaatcaggtataagagatcaaatgttgacattatctgaattaaccacaatgatgctaccacaattaagtgagcatttacagaggtgtgattcttctaatttatttttttgttttcgtatgttgttggtatggttcaaacgagaattttcatttaatgatgtttgctcaatatgggaaatattttggaccgactattacacttcgcaatttcaaatattcttcatgttagccattttacaaaagaatagtcaaccaattacacaacatttaaatcaattcgatcaagtaataaaattttttaatgatttacataacactatggattggaatgatttaatggtgagaagtgaattattatttatacgttttcagaaattaatgaatgtgatggatagaagaactcagcaaaattattatcaccaacagcagcaaataccatctggcacagatcaagaagatgaagaagaaattataacaggcatcacaaatgataacggaataactactagtggtgtagaattacacgaagttgattcaaatggtgaagaacatccagtagatcaagaaaatgaaaaaaaatattcacctaataacagcccatacttacaattgttacttaaaaagactttaattattcaacgggagccaccaagaactcatgaatcagttaaatgataaatgtaatagttaattattcaatgatgattattgatatttagttttgcaacaaaaatttttttaaggatagtataattaaaactgaattttatccatgatgtcaatataatgcagtcctggtgaatttaaaaattgaggtttacacaattatttttttaatgatttgtatttatcttatacttcaatgtatgatactctctatatatagtaccggttatttaaatctcgcttttttttgtatggcattaccaataaaaattgatggttctgtcatagtagtatatgatcaagttttgttttcggagcgggttcttctcttggttttgtgcctctgagtgtcttttctacttttttttattaatactgtactaatacaatattgcatatttttgtttataatttctctgtcagctgtaagctattgatttttttttctttctttttttgatctttagaaaatccactgcgctatatttaaatattgaaattgcatggaaacaattattttaaacgaataagattcaatgattattgtgagaatagacatattgttgcctcaatattacatatgtagacacatttacacgattatatataaagtagcaagcagtcagacaggttacacattttgagcaaaatgatagacacaattccttcaaaagttattaattggagcattcttaatgaaataatatcaatggatgaagatgatccagaattttctaaaagtttaattacacaatatattgatcaagcaaccactacttttcatcagatggatgatcatttaaatggggacaaggacttgaaggagttggacaatttaggacattttttaaaaggatcctctgcagctctaggtttgcaaagaattgcttgggtgtgtgaaagaatccaaaatttgggtagaaaggcagaagattcatttcctaaaaaatcagaacttttgaagacattaccatctacaattacagttgaggacaaagataaatgtgtggataattcttctgaatcagataacaaagaaacagatacttctggggatgagttatatctgaatctaatcagccaggctttaattcaagctaggattgagtttaaactggcgagaaaagagttatcagcgtattataaaactgaactttaggtcaataattaatttattttattaccattttgtacttaatttaaagttttttgaattagcacacttttgtcttacctaatatctttccataatatataaaagtgtgtgtgtatacgtatatatatatataataaataatttgaataataaaggatagtaaagttatcataaaatcattctataggaactttgtatatactatactattttcatattgtgtataacataactatatatctctatcttaagtttatcatattgtttgttagtatatatcattaaataaaaaaagagaaagaaaaaagaaagaaaaaaagaaggtagtgaatgaatcaatattgatatcttatacttttcttgatgttatttttattttattaattcgtaaatatcgccaagtttaccaacatagtagcttggtcttgggtattcctcagtaacatgtaatgccctttcttctgtttcaataccagaaagaactaaaagtgtaccacccaagttaccttcgtaaccaaacttgatatcagtattcaatctatcaccaaccatacacattttagacttctccaatttagcatgtgatataatactgtctaacatattcatatttggtttaccacaatagattggttctcgtctagaggaacaagctgcacaggcgatgatagagccagcaccgggcacaatataatctttttgtggaaaagtacagtcaatgtttgtaccaatgaaagatactttatcttcaccctctcttagatattgcaaagtcactgctaaccgatgatagttaacttcacggtctaagcctgcaataacagcacgaacatttgggtctaaaccatccttcaaaaagggtgatgtcttagcatcgaatggttcatttaaacggggatctgtaccacctaaagcttcataacctagagtttctaactcatccataataccactttcacccaaaacccaaattttatctttaccaggttgtaatttcaaaaaatcacgaacgtaaatagcagatgcaaaagcagatgtgtaaatttgatcaattttaacatcgataccataagctttgaatttcttttgataagaggcacgtgcccttgtggaattatttgtgacaaagtaaacttttttacccattttattcaacttgtctagaaattcttttgtgtatggtaataaataatcacctaaccataagacaccatcacaatcgaaaaggaatgtatcaaatttattgaaaaattcttcagcttccttttttgtggctattttaattggatcagtagaggtagtcatgtggcaacttgtgtctgaaaagtcgaagaaaaattgaatttaaagataaatactcaaagctggttcaacacagttagtgaactagttacctatgtaattgtattttgtgacctgtttatagttcagtaaactgtttagataagataagaatattgaggtgattttaattatgcaggatcactgtttgttctacaagatgttgatcgtgtatatttattaacgtagatggcttgactataatcaaatttaaaaaaaatattgagagatcaattttggagcatcgagaaataaatttaccttctttttttcttttcttttttcttttttcacttttcttttgttcttattgtaacacggaagttgagtcaaggttcaaaaaaaagcaataaggtaaatataaaaaacagttggaaataaattgaaggcaatagtgagattatttattggtatccattaattagttaatatgggtacaatgatcgtgcaaccggtgatgttttataacctcgttagttttagttgtggatagtacttacctccaattgcaaaacggttactagataacatataaaagatattattttaccagtttaattctctgttttaaccacaataatatagatacatatacatacaaattacttaatcgtaaataataacataattctaagctctattaatcaaatgttcgtttttttttttttgatttcttatttataaggttcttatctcttcatgaagttatcattgggcgctggacgtaaaaaagtccaataaaaaataatgaataaataaaatgaaaatgaaaacttgcatccatttttttcagttaatgtctttgtgaagcatagattctctgcctggaccagtaccaacccattctactgggacgccaacaaaatcttcaatgaatttcaaatattttttagcattttctggtaaatcttcatatttagtaatcttggtaatatcttgattccaaccaggtaagttaacgtattcaacgtcgactttgcctaaagtcattaagtcttcaggaaacaaatctagttttttgccattgacggaatacgatacaccaactggaatggtctcgaatgtatcaaggacatccagtttagtgatgtttagactagtgtaaccattgatcaaagttgaatatttcaaaacaactaaatctagccaaccacaacgacgcttacgaccagtagtaacaccgaattctgctccaatggtttgcaatttatcaccaaattcgtttagttgttcggttgggaatggaccttcaccaacacgggtagtataagccttgacaacaccataaacatcattaataacatgtggtggaataccaagaccagtacagacaccaccaatactagtggaagaggaagtaacatacgggtaagtaccaaagtcgatatctaacattaaagcattagcaccttcgacaagaatcttcttgttagcttttatagcattgtgcatgaaaaccacagagtcaacaacaaatggttttaactgttctttgtactgcttgaatcttgctaattcttcttcataatcgtagtcaaaatcaccatatctttgttttcttgtctctaataatctcatatacttggatacgaaaaattcccaagcaccagggttatcgttaaccaaatgatggactctaagaccagaacgagaagccttggtagagtaagttggaccaatacctttaccggtggtaccaatattttttccatctttagaatggtcagctaattccaattctcttaatttatcggttcttctgtggaaatcaaagattaaatgggcacgggaagaaatgaacaatctctcacgggcattttttaaacctttctcttccaaattttccaattcttgaaagaatgatggaacatgaatgaccacaccgttacctaacaagttttgacaatttggatttactaaaccagatggcaacatgtggaaatcatacttgacattatttaccacaatagtatgaccggcgttgttaccaccagcgcaacgagccacaatgtcatagtgaccgactaataaatccaccaatttacctttaccttcatctccccattgggaacctaaaaccacgttgaccattttttatgtttgtccttgtagatttgtattagttagaactgttctctgctgtgatatgattgcctaagatgtagggaacgtacgcaaatgaactatataaagtgtctgtgtttccttatcctttactttcaagatataatgttttcaagcgtagatacttgaagatagaagaaaaaattgcaatatgcgaaggacattacaacaataaaagttgtttagctttataaatttattgtgattcggagagagaaaaagcaagaattataacacaacaaaaggcatgtggaaaatgtgagatgtctacgaattcaaagaaacatgggtatcgaactgatatatatatatatatttatatttagttacttagtcatttacatatatgtaaacaaattatatccatgtttccaattaccctatttggatgcaatgttatagaccgtatgatggtactatttattattgaatttaatctcaaattaaaaaagaagatcatgtaatttttttgggttattaactgtctcgagtaacttttggaaacaaaagaatctgataccaattacaaaaaaaaagaaatgaaaagagtcaaactttattgtcatcagatatataggtctttgatgcattttcttcatttagtatgcatttttcaagaatgcatgtagggctggacagtaattttatgtcaccaccccgcacttaatcagaggagtgtcgtacaagttgttcaataaagaaacaaaacccttatcatccgacgattttacaacgcgtgttttcagttttccatctttccatttaggtagggcagggaaaattttcattgcgtaaaaattaaatagaccgaatattgtaataataacataaattaataatgttgacaaaaaaaaatgagtaccccgttctggtccaatcttattatattctttcttttttcatttttttttattgaacgtctatcttattttctttctttcttttggagttaggaaatttttgataaaaaagtaaaaaaaaaaaaaaagaaaaaggaaaagaaaaagaaaaagaaaatgttagggtggtttctaactggggaataataacaatagaagagggtcaagtttctagttaaatgtaagttccgttcaaagtgaggcaaatcgacttctctgtacaaagtatcctacgtagggctagttcattttctttttaatttttaagagcgtgtgtattatcaacctttaaagaattagacacgctttaaaaagaataatactctataaacagaaacaaattaagtatttattctgttttagtagtctagcgaaattcagttgtagttgtacatttcatcaatttttattgataatttttgtcaatatatatatttctccgttaaagaaaagaattaatatattcattttctcctttgaaaacgcaattgctagtagaagtagggttgactagaaaagtagtactcgagcttagaattttggtcactataaaagaggtgtttacaccttatacaaaaatattcaaaaaaaaaaaaattaaaactaatataaatcgtactttaataaattattaattccacttctcattttgtgaagcagacagaatcaattttccgagtaaaaaattatctgagtaaaaaaataataatatataaagattcttctatattcgttatttttgttacacgagtaataaaaatacaggacatactgggtaaaaaaaaaagtaactcagtctctttattccgattgtttgttgccgtgtgacatgatttcctccttttgagcttcgagagagtagagaaagattgattgaatgggaatttttatttctataatcctgattaggaaataccctataaaaaattgttttttttaatttttttgttaattgacttatagttgtgatttaataacacaatgagataaaaaatatttttgacattatcttgggacaagtcagtactattaagcaaaccaatactattttatctgtaggggaggaaccaatttgttatagttgttagggttctgttttctttcttattggtaaaaaagtgattgtactcacatcttgcattattaggctatgtgtttgtaagggtgttaacgtttttttgtctttattggttagggtatcttgaagaatttttttttgatggagttcggcctctgccctcagaaaggaagaggaagagtaaatctaaaaacggaaatctctcaagggttatatcccacttctttcctttctcctatcagattcctcgagaaatgatctggtgatgcaaaggaataaaagacaaatacagacagacaataggaaaaaattcgagtgataaaaaatatcgagtttcattattattgttgcacattttacatgagtaaaccttgatgataatggtgtcctatttttttgttattttttaattggccagtgtaagacaagttgaattataaggttatataatattaatggatgcttagattatttaacgtatgcgacgatgatatttttgatcaacttgttactcgttgttccattttttttcttgtttaaagtaggttccgtttttttggcgttgtctttttttatgtaaagcggctgtcgtgatgaagtctcaatacaaattaactattttctatggaaagtttattgacataccatctttaaaagccggttttaggattagaagtagttgtgctattggtgttaattcggagagtggctcaattgtttttattcaagaaaactttcatgacgatttgcttaaattagcatcaaattgggatccaaacttgaaacatgatgaggttaagattgtagattgcaataacaataataataataatagttatgcatttctctttcccgggtttgtggatacgcatattcatgcttcacaatatccgaacaatggtctctttggtaaaatgagtttactggaatggcttaatgaatacacttttcccttggagaataaattgaaagatctaaatattgctaaaatagtctattctaaggttattgaaagaactttgtctcatgggactaccactgcagcctactacgcaacgattcacttagaatctacaaaattacttgccaacttatgttctgagtataatcaacgaagttttataggtaaaatatgtatgaatcaaaattcgcccgcctattacgttgaaccttctacggatacgtcaataaatttaactaagaaattcattgaacatatcaatagcatcaataatccaaaaattaacgctattatcacaccaagatttgctccatcttgtgataaggatctcttatgtaatttgggtaaattagctaaacaatatgagttacctatacaaacacacctttcggaaaatttaaatgaattggaatgggttcacgatttgtttccagaatatgcgaattacacagaggtttataatcaaaacggactattaaacgaaaaaactatcttagcacattgtatttatttgaatgacttagaattaaatacgattaaaagtaaaaactctggaattgcacattgcccaatttcaaactcttgtttatcttctggtttatgttctgtcagaaaatttttgaataaaggaattaaagtaggcctaggcactgatacatcagctgggtatactacaagtatcttagaagtagctagacatgcacatatggtatcaaggcagcttgcctcagttgagggaaatgatgattgtaaaatttcagtgacagaatgtttatatttagctactttaggtggagcatatgtaatgggtctacaagatcaagttggttcgtttgaagtcaataaacaatttgattgtcaattaattaatctaacagtggaggggtcgaagatagatttgttcccctgggataaagaaactgaaaaattagagaagtggttttttaatggtgatgatagaaatgtacaagcagtatgggtaggaggtcaagaatgtggtattagaagtaaatcttatctatgatgagtaaataggagtttatatgtctaaattttttgattttcacattactttaaaaatttgtatttttttcatcgtgttatatttatattttgttggaattttcttttcaagtacaaaaaaataatccttgttaaaaatgtcatcataaaataataaaataaaaagttataatgtagttattacaaggttgtcgagactacaaaaaacacttcatgtatttcgaccagttccgtgaaaacaataaacattcaaaacaggctctattgaacgacgctttatatctttgtgaaatatatcagaaacgatattttgttggaataaccaatattgtttctcaaggaacattgatcaaattttgtgacattttaaatttcaaatataaacaatataaagaaatgttggatcaacacaatacaatctcaacaaaaaaagacctaagaatacaaaaaccaaaagacgactttgacaatgataaggaaaatttttttgtgtctgctaaacagtctccagagaaaaaaatgatatacaatgaaaccaaagaaaatcgcataaataaagaaccattaacacaaaagaatatgaaccctatatttattacacaaacaccagaaaagcaattggattttcttcttcaaaatattaaatcactaaagatggataatatctcaaaatttgacattcaaaaggataaatttcaacaaattatttctgattttcagatactagaaaaaaaaatatttaatattaaggagaactatactaaacggattgagttacaaatatcaatttttaataaacacatcaaaaattatgaaacgaaatgtaatgagattttgcatcaaaaaaataaacaacttgaaagtgctaataaagcacttcaagaaaaggagatacagctacaaaaactcaatgaaagaatatttaatcttcaaaagaaggaggataaactcaagcagatagatttgtttacaattccaattggtaaaatattgttagaatatatgaaggatacaagaaatgatatatcatttgaggtatatttcaaaaaaaatttccctaatataacgtcgttttctaatattagtcagaaagaaagttttcaaagtttacaaagagaggttgttgaaaagattgaatcacttaaaaattttcatgatatggatacagaattacgacattttataacttcaataacgaaggtaatcgaacaacaaggaaatagtctaacaaatggaataaaaatattatatgaacaagtacaaaacttggataataaacaaaattgtatagcagaagacaaaaatatagttgaatcattaagcctcttaacaaatgattattctagacaaattaatttaaacaatgaattaaagaataatttaacaactgtacaaaatattttaaaggacacacaatcccaattgaaaattgaattagcgaagaataatgaattaaatgaaaatgtgcaactacaaaatgtgactctgaataatttgagtgatcaatataataagttacaaggtgatttagcccaaaaattgagatggaaacaattaaaggggattaacagagattcaaataagtcaaaaaaagatttagaaagaattgaaatgatgtctcatgttgaattacaaaacatagtaaaacaattggtaatattcttagatataccaatagacaaaattagaacacaattaataaaaattagtatatccttaaaatacgaaagaaacttatccatatattttatcgggaatatcaattatcaattgactggtcaaaaaattaatttcaacaaatatcaaaaagaagcgtttcaacagttccaaaaagacacctcattaaataacatagttcatccattgcagacaaaattggatactttattagatgaagtgctactgaaattatgacacaccaataaatttttttacaaaataaaacaatatatatttgcgtacatataagctatttagcatagataaaattattaatttatctatttgcgtgcctgttattgatttataccaagattaatatataaagtgctgtgagttatactcagttgccatagagagataagttcatcacctcgcggttaccaatgtaattttgctagccaaaacataggttttgattttttttgtgaaattttttgcctctgctttcttttttttttgttttttcttttctcctatcaaataaagcaatcttaatcttagataaaaataacaaattcaacgaagagaggacgaaaaagacatgttgctacttcaataggaagacttccatcaagacttgtcctttgtcattaccatcttcatttttttattcatttgtcgttttaatttaatttacattattttcattgttgtgttttagcttgataacgggagaacacgtatgaatgttattcaattgttatttagaagaataaaattactagattagatatctatacgaaaccattattgagaattcagttagttctgaataaatctaattatcttacatacaaatacagatatacatacgtataataataataataataagaagaagaatttttcatagcttcacttaaatttagcagaacaatgaataatacttttacaggaaattccagccaactttctaatttatctaatgctttaagaaatgtgaatttacaagatgataataacagtaatcatggtaatcacagtatagtaaataacaataaaaatgattcttcaagaaataacataaatatccaaaataacagtagtagtgtagacaataataatcataacaataacaacagcaataataacaacaataacaacaacactagtagtaacactgatcctaacaataatggtaataataataacagtagcaacactaccaatatagacatacaacagcaaatgcatcttcgacatgcacagactgctataaatcaaaatagtaatattattccacaacaacatcatcaattatctaatgatttaagtcatattgacaattcaagattagtgagatttttccaaatgcaaccaatatctggttacacgttattttcacatagatctgcaccaaatgggtttaaagtagccatagttctttgtgaattaggcttacagttcaacacgtttttccttgattttaatcgtggggagcaccgtgcaccggagttcatctctatcaccccgaacgctcgtgttcctgcattaattgatcatggtatgaatggactatcaatatgggaatctggtgcaattttattacatttagtcaataaatattggaaagagactggtgatccgaaactttggtcagataatttagcagaacagtcccagatcaacgcatggttatttttccaaaccactggccacgcaccaatgattggacaagctttacattttagatacttccattccgaaaagataccaagtgcgttggaacgttatacggacgaggtaagacgtgtttacggtgttattgagatggcattagcagagagaagggaagctttgattatggaattggatacggagaatgcagcctcctattctgcaggtactacaccgataagccaaagtagattctttgattaccctgtttggctggtatgcgatagaatcacgatagcggacttatcatttgtgccatggaataatgttgtagacaggattggcattaatattaaagtagaattcccagaggtatataaatggacaaaacatatgatgagacggccagctgtcattaaagcattacgtagtgaagagtaaaagaaaaaagaacaaaaaaagggaagaagacactcatggaacatttgtgtagtttataaagagaaatgtgataatgaaattttatcaataacgactaaacaccagcaagtgtataaatacatacgcgtacacatatattatatattatatatataattacaccattacacagttatgcaattacacaattgcacatatatatatgtgtgtgtgtgtgttcttatcaatatctaactgaacaaagagtattaggactgatagtagattaataattacacgaaaaattgtcctattttctttcttcttccgacctcatctcagccaagaatatttcactttcatacacacgggatccagcatgcgggatttacttgccgccaatcccgattttccggaaaaacaagaacaaggaaaaaaaaaaaagaagattaagtgtataagaaatagaagaaaatatcatagaccatttttctttttttccctcctccttcttccttctccatctctattttcctctaatttgctcacatacatacatacttgcttgcagttagggcttgtagagaagaacgtgataccttgagtccgtccaatttacatggagttcatatatgagaggtatttgttgtgaacgcagatttaccagggtaaattgaataataataacttgttttcctctatccactgattttttttgtattttttttgtccttttttccctctctgctctaaagttgtgtgtattatattagtaagaaaataagaagaaaagaagatgcgaaggaaaaaaaaagacaaaaaaacaaaaaaaataaaagaaaagaaaagtggaaagaaccttattacacttataccaagacccagacatcgcaccgaatacaaacgtctctctcctctatttctccaagtcatgtgatccacttctctcctatctcctatctccgaccctccactctttttctcccctttttccccctttttttttttcttctttctttttttttttttttaccacaaatttaaacgacacctcattttgcattttcaattttccaccacaacggcgaaaaaaagaaaagaaaagaaaagaaaagaaagagaagaccttcaaacacaaaaacaactttgaatattttcaactaaacttactttaacgcagacaccaaatacacacacacacacacacacacacatagagaaagaaaatgagagaaacacattacaatgataatctccaaactaatgggcacaccataaatattattacataatctcttggttccctctccttgttagataaatgttcttttttgttttattttccatcttcttcccttatatactcatctcgaataacacaactttcttctcatgagacccaatttgagtcttacacgtatttcctactatcagtcttcaattctgtttctgtttcctttctcgtttttcttttccttctttctcttattttctataatatgctcatattttccctctttgcctcatcccttacttgatttttctttttattttaaatagactatatatatgaaacatcacctattatatatatatatatcaactatttagcactttacccgtttcttctcatccttgttgcaacacctacccacattggctcaaactttgccactttcgtgttttcgattatatattcatttgaagtgcagtcaataaagtaaacacaaaaaaaaatattaaaaaaagaaataaataaaaaacatcacaaaaaaaacaaatttataaacattaaacttatcacacaaacacattcaacttcttattcataatcaattctataagcccttatacacttcctctattcaatttaatagaataaaatcaattttttttttaaaaaaaaacaaaaacaaaaataatataattaattaaataaatatataattatataaatcaatcaatcaatcgattaattacttaaactgaaatctcctctatttgttctgatcttttaaataataataacaataataataacgacaacaaaatgactgctcatcctgttaaattcgataaaaacactgtcatcaccgtcttcggggcttctggtgatttggctaaaaagaaaactttccctgctttgtttggtctttatagagagggttatctagacccatctactaaaatcataggttatgctagatctaaattaacttgtgatgatttgaaaaatagaatcaaaccatttttaaaaacaccaaatggagataaggataccccaaaagttcaggatttcctcaatatgctatcttacatatccggtccttatgacaccgatgaaggttatctggaactaaaatcccatatcgagaccttcgaaaccaaggctggtgtccacgaaccacaccgtcttttctattttgctctaccaccaagcgtcttcttatctgtcgcaaaacaaattaaaaagttggtttacgccaccaacggtatcactagagttatcgtggaaaaaccactcggccacgacttaaagtcctccagacaattacaaaaggatctgtccccactattcacagaagacgaaatcttcagaattgaccactatctaggtaaagaaatggtcaagaatcttttgccttttagattcggtaacttgtcaatcggctcttcttggaataaaaacaatatccaatccatccaaatatcttttaaggaaccattcggtaccgaaggtcgtggtggttacttcgataatacaggtatcatcagagacgtcatgcaaaaccatcttttacaaatcctgacactcttaactatggaaagacccgtgtccttcgacgcagaggctgtacgtgatgaaaaagtgaaagtcttaaaatctatggccccaatcgatgtcaataatatcatcatcggtcaatatggtaaatccgaagatggtacaaaaccagcttatttagatgacgaaactgtcagtccaaacagtaaatgcataactttcgctgctttgactttcaatatccaaaatgaacgctgggatggcgtcccaattataatgagggcaggtaaagccttgaatgacggtaaagtcgaaattagagtccaatacaagagcgttgccaccggtgcattcaacaatattccaaataatgagctagtcattagagttcaaccaaacgaagctgtctactttaaatttaacgccaaggtcccaggtttatccaatgaaactcaagtcaccgaattagacctaacttatgcaacaagattcaagaatttctggatcccagaggcttatgaagccttgattagagacgctttgctaggtgatcactccaacttcgtaagagacgatgaattagacgtctcttgggctcttttcactccattattggaatatttggaaggtccagatgcaccacaaccggaaatctatccatacggttctagaggtccaaaggatttaagtgattatttaaggaaaaaccattttgaagttactaaatctggctacacttggccagtcacttctcctgattccaattaaaaatacagatacaaaaaaaaataaatatcattttacaaatagctaattttatacattctaatatccatatgttttatcttgtaatgtctacgtattatatatatgagagtactaatagaaaccacttattattatttattgtattactttattaattttgttgttttattttttttttttgctactaatgttacaacttttaaagttcttacttaattatcttatatactataatgccaaccgaaaacaaaggtaatacctaaaataccttcttatatacacataaggaaaaactaaaagattattagtcagaaatgaaacaaaatgagatgtgaatatgttctttcacaaacgaatattactaatattttcactttggaatgcaattacattggaatttttcactcgcatagaattttttctatcaaattctgcataatctatacttttatcccgaacttttgaaataacataatttttaattcgttcaacattaattgtttgtgtacctacttgtgatttaatatcacttaataacacgtataaaaacttggggataattgcaatctcctcgttatgttttattaaataatttgttatttcaatagccaaaaagtgatgttgaccttgattctcggcaaaatcattcgctgatgattccataggttgcaattccatttcacatttatttggctgatataaaatatttggtgcaattacagtagatatattatgaatgtccatttttgaccccatttcgttttcaatatgtgaaaatgaagccgtccaatataaaaatgataaaatcacttctaacgtgttcctattaattacaggtaacaaagaatatattaatgataacactttccccaactgaacatctgattcaattttggctgctttaatccataaagggtataattctactgttaaaattggatctggtagttctcttatccatttcttcaataaggccgacaattgaatcgcattttctttagataaatcagggatgtctaatggatgttcatctatcataatagttaattctctcaatcttctaatattaccatttttacggaatataccttccacagacatatccatctgtcgaagtgatgaaattagctcttctaaaacaatagggatctgtatcttgataggacctactccaagatctgaacgaatcccccacttctcagttaatatatctaatggtgatccaaaaacctttttaggagtcggtttccttgatttcatacccataacagttttcatagaattccagaaatttgactcttgtgatagtaaagccttttctttgcaaatgtaagaaacataataagtaaattcctcctcagtaagttgtttctcttctaaaagaattgcagagcttataatcttaattactttcaaatctttttcatctaattctgagtaataaacaccacttcccgtctggtgaactcctaagttttcttcactatccttgagctttttaaaatgagtaaatgcatttggcctcaattctctggcctgttctgctgccacgatccttgagatatcatctaaagttaaagatcttaaattattaaaaactttttccggatttgtagccttctccttttcaggtattggtaaaagtttttcagtttctattattaaacctgttgaagttcctttatttctttttgaattaatatcttcttcatctgtatttaaaactactgatttcctggcctcttgtttatcatatgatatccgaacactttcccttttagaccgcagtcttttaatatcgtttaaagttctaatatatgtttgctgtataactaccgagtctctttgattattccttttctcctttaattgtggctctcgtaattgtgcagttagaacagctttagatcttactagagcaattttcaataaaaatattaattgggacaatctggatacaagtttgaagcctggtaccgaactaggatctcccaatgagcagttaaaacacaatttctcatttgtattccccctatatgtagcatcatttatatccaagaaatttatcaatgtattacatcgtgaacatgtaaaacactgtaaatgccatctcttatcttcaaaccgaatacattcttcttgaatatatttttgacatccactacagttatctgttgtcacaattggtattgaaatgttattaaatggatatttatcaaataattcactcttctctaatgcatttaggaattcaattaagggttttgacgaatgtgtagccttatttgtttccaaggctgtatgaaaaccaaaccttaaaatcaatttcaaaaaatgggctaaccctgttattactgacatgaatgatgctactacagaatctgtccgtgtattaattttcctcaacaattgtaaatatatcattatcttcgtagttaaattccttgttagtagcttatattttgttggtaaactatttgagtctattgaaaccgatgcatctgtctttgcggaccgagtggttggtgaatcagatttatctgtcacagaattagtattttgtggtaaaaagcaattaaaatcactaaaattgttaagacctttaaacaaacattcaagttttaaaacgaacaaagcagtagattcaatacctttcatctgttcagaactcgataaatattggaacatatcggagatacacgaggcagtagcttcttcaaatttatatagaacagtccaagtttttattagaataaaagtaaaagcttgaatatgttcgtccaaatcttgaggtgaaaaattggaatcgtctaacggtacagttggatcatatttgaacaaaggaatatttggtaaacctaaattatctggtgataaattgacgcgccaatacttgtgaattccgtaacattccggatgccaacagtggatttcattcccctttggaaattcaatatattgatctgagattggataattgcaacctttacaacgtttggagaaaaattttaggaaatggaatttgcaatatagtttatcatcaaacataaaacatttctggacaccacatggttccttacagatggtacacgagaaatgttcttcatcataacgtcctccaaaagctgtgtaatataaacctcggagtggcttatcacatactttacatagcagattatgtcttttaaaataatgatactgacaaagcaaaacaggttcttgttttggtttttcttgaaatggaaagaatttaggtttaagtggcttatgacaatcaaaacaaataaaacatctttcatgataatatttacccaatgcttttaaagctccattatttttattattttcagaataaattggtttaccacatttggtgcaaatcttcacagatacgctagttgtggttttccgcatatcattaatatttggttgtcctgtattaattaattgttgatgttcttgcataattctttgagccaccacatgttgttgattcgacattcctaacaatatgagtgttgttatagactcgtaggcaacacgatggagaaattatggcctaagcaaacaaacaaacgttaatgacttctaaaatttccctttagactaaaaagaaaggaaatgtgagtaactaaaagaacaatagtgaaataaaatatttacaaaaaaaggacctctctttatccttatcgatattggtaataaacaatcgttgatggcaaaaaaatgtatgtaccagatccacaacactgtacttaatagaatagcatacatgggtgtacacacttgtgtttatttgtattccctccctcagtctccttctgttatctctcttctatttttagtagattcttgttgccaacctcgagggtcccccaagtttgtctcatcatgaaaataaaaaaaaaaaaagagaagaacaaaattgatgatctgattcgacttttttttttttgtgtttttctctttctgcgagatgagaattttggacaaaaaacacgtcatcgaagatttttaacctcacgaaaaccagaaagtagggaaatggcaatatattaagtacatttgagaatgtatatatatatacacacagatatatatatatatatacatatacacatagacatatgttatttaagatgcaaaattttcgagaaactgtaaatgaaactccttccatccctgtatccagttggtgcctgcaggtaagaaggtggttcttatatgatacgttccaggtttctgtccaaaacctgtccctggaacaacacaaataccagtggagtccgaaagtttatgacaataaaattcatctggttcatacccagccagtctagcctctctaatagcattttcaggtaatattagttttggaaataagtacatcccaccttgtggttcttcacattcaaacccttttaaactgttaaatatcctatataacttctttgctcttaacttcattttatcatgaatcagttgtcattctgcaagatcggattcatacgactcctcaccaggtcgtggtcgtctcaccattaaatctaccaagacttgtccggaggtgcatgcacacaatgatattgaaaatagtttgaataattcttgttttacttcttccctgaggccaattacttccatgtagccacctcgttgaccacattctcctgacacgcctttcgatgcggaatgtaaggatattaattgcagattatcatactctccaacacttaatgctcatttctataagtacctaaacacttttttcattgagtggaattgtacatctgctttaataatattatgttggtaaacttcatcggcgatgacaatgatcccatatttattagcaattttcagaatattggccaatgtatcaaaggataatattgaccctgtatgatttcctggattaattattaccatcacttgtggtgtgatccctctactcattgacttcttaatcacattttccatttcagttaaatctatagaccatccttcttcctcattcaaatagtatggcaataattctaaattatacatagccagtaatgctgtatacaaaggatattgtagtattggtaataaaacacctgtatttttatcttttgcaaatagattaaatatattcataattgcaaatgtagtgccatttgtcaaatatatgtcctctggatcacagctctcaccatctctctccttaataaaatttgcgatattttggcgtattccaaggattccctttgttaacgtgtaagctcccatagatttcccaattttatatattaagtcctctgctcgttcaatcacgtcctttttgtatgtcttattttcaaacaaaatatctttgtgatctaatattgatggattttgcacaatagaaagtacttacctagtgaaagttaacggtttttgatctaatacttgcggattgccaattaatgcattagttacttgattaaatgataaagactcgggtctgtcaatcagctgttgttcatatgtttctaatttagtcaataatggacctctaattgcatattttgcttttactatattttcattcagatcagataatgtctttttaattgagggcttatttaatctattcatctataatgttttatgtgattctttttgttttttattttttggttgatctatacgggatcctttattaatttattcgagttcaaaactagttaaaaaaatctctataaattggaacaacctatttttatttattatttaaatatactataatttaaaactcatattatttctttgagtcatagaaaacttctcgagcaattttatttcatgactattcatttactgaataaaatatttgttagaaaaataaaagaagaaagaaaggatgacattttatagccaccaatcttcgattttcctttttgttcatatggatctagtaaaggtgagtttatttttagttttaataattcatttaattgacaaattttacaaaaatgtgagaattttatgaaaagacaccttttaaactaattttaaaaaaagatttatttttcatcacctattttagattaatactacatcattttaatttaccaattaccttactgtcacacatttaaaagtctagtaatttgtgaacaaaaattatatatattatttttgtttaaattactaactatatttttggaagcatttgtttacaattttgttaaaaattaaggtaagtatgtactactcaagttagatattgtcttcaatatagtcaataatgaaatgaatccctttctttctgtttttcatatacaaagaaaaaacttagtaatacacagaaaaactttaaataaaataaaattataatatgagaaaaactttaactttatatatataaatacattaagtgatttttctttaaaaataatcaaaaattaaccatataattacaacaaatattcagtagtatattgtttgatatttgctaaaatctcatatctctgtttatttcattctagaacaatctatcatagcaaaatcaacaataataaactatcatcaagacaagaacaaaatttatacaattaatttattattttaagatcaacaaatatacaacttataaatatgtttgtaacgtcaactgctgctttgtgatgcaatacatgcaataactcttcaaaagaaataaagttgtaagataaaatatatgaaaaaaatagttaaaatttacaaaaggcaaatcaagggtacttttgaaaaaacactatattaaaaagagacttgaatatcaaaacttttacaaaatttaagattatattaacttattgagtaatgtaaatatataataaaatattagtggtcctataacccgtaacttttgttactttattttttcctattctacttaatcaccttgtaggatattataatatatattgtaatttcttctcatttaagtctattttatagaaacttttatatttttttttactttgatagcacaatgaatttaaattatcaattatatctccgatcatcttatagatcattatatcatacctacttatacatctacattgaagaaaagagaatccatagcttcaaatactctagtttttcattcctggatcaccgatctaattaacttcttgaaaacaactgagggtaaaaaaaaattgttaaggtgtatacactatttattaaaacttctatctttctccttgaatcttatcaaatccaaatctttacagttcctgtttcttttatttagaaaaattatacaattttttaaacttttgaatcatgttcagttagattcaaaactatacgacagtaagtttcctaatcataatctcctgcttcagtatagttaaaacatgtaacaaaaaaaagtttgttaaaaaacatgtgagggattattaaattttataactgtgtttgataatttaaattatttggacttaaaaagtgacattattactttcttagttacaatcatatctatctttggtatataagttatttagaaaacaatccaataaataagaaaaacgcacaataagtacaatattgaggtatttatataggcttagataacaatatttagttatgtatcgatttagaaatttttattttaaaattattcatatatctacaaattaaataataataaataataataacccaatgaaatgagcaacactccacttcatatatatggtactacccttaccttcatatgatacaagagaaggtgtacctccatgagatagtgtcatagcttttggtgatgatgatggttgctcagaaacatattgggagatttgtggcgccattgtagatgctgatgttcctggttttctagattcaccattacctactgcagtgctagatcctttaaagtttctagatgttggatgattttcattgttggtaaacactggaccagttgtggtgggtgcaatggaaataactggagtggcattagacacagcagaaaatgagttagtctcatcttgttggttccttgaataaacagattcaataaaactatgtccaatgatagcagtcatacttgttccggaagtttcagatggttctggacaataagttgttgtcatagtaactccattaacaaccgtagttaaaacaactaaagtgttactcaaagtagattccattctttcattagggatagtgaagttttggtatatgagagacgatgatccgttgctgttagtgacaacagtggtgtaggttgatgtggttggggcagtaacagcaccagtagcagttgtagaaataacagaaccagatgcggctggggtgatcacaacaacaacaacttcagtagaggatgatccgttgctgttggtgactacagttgtgaaggtcgatgtggttgggacagtgacatcgccagtggtagtagtagacaaggtagatggagctggggtgatcacaacaacaacaacttcagtagaggatgatccgttgctattggtgactacagttgtgaaggtcgatgtggttgggacagtgacatcgccagtggtagtagtagacaaggtagatggagctggggtgatcacaacaacaacttcagtagaggatgatccgttgctgttggtgactacagttgtgaaggtcgatgtggttggggcagtaacagcaccagtagcagttgtagaaataacagaaccagatgcggctggggtgatcacaacaacaacaacttcagtagaggatgatccgttgctgttggtgactacagttgtgaaggtcgatgtggttgggacagtgacatcgccagtggtagtagtagacaaggtagatggagctggggtgatcacaacaacaacaacttcagtagaggatgatccgttgctattggtgactacagttgtgaaggtcgatgtggttggggcagtaacagcaccagtagcagttgtagaaataacagaaccagatgcggctggggtgatcacaacaacaacaacttcagtagaggatgatccgttgctgttggtgactacagtggtgtaggttgatgtggttggggcagtaacagcaccagtagcggttgtagaaataacagaaccagatgcggctggggtgatcacaacaacaacaacttcagtagaggatgatccgttgctgttggtgactacagttgtgaaggtcgatgtggttgggacagtgacatcgccagtggtagtagtagacaaggtagatggagctggggtgatcacaacaacaacaacttcagtagaggatgatccgttgctgttggtgactacagttgtgaaggtcgatgtggttggggcagtaacagcaccagtagcagttgtagaaataacagaaccagatgcggctggggtgatcacaacaacaacaacttcagtagaggatgatccgttgctgttggtgactacagtggtgtaggttgatgtggttggggcagtaacagcaccagtagcagttgtagaaataacagaaccagatgcggctggggtgatcacaacaacaacaacttcagtagaggatgatccgttgctgttggtgactacagttgtgaaggtcgatgtggttgggacagtgacatcgccagtggtagtagtagacaaggtagatggagctggggtgatcacaacaacaacaacttcagtagaggatgatccgttgctgttggtgactacagttgtgaaggtcgatgtggttggggcagtaacagcaccagtagcagttgtagaaataacagaaccagatgcggctggggtgatcacaacaacaacaacttcagtagaggatgatccgttgctgttggtgactacagttgtgaaggtcgatgtggttgggacagtgacatcgccagtggtagtagtagacaaggtagatggagctggggtgatcacaacaacaacaacttcagtagaggatgatccgttgctgttggtgactacagttgtgaaggtcgatgtggttggggcagtaacagcaccagtagcagttgtagaaataacagaaccagatgcggctggggtgatcacaacaacaacaacttcagtagaggatgatccgttgctgttggtgactacagtggtgtaggttgatgtggttggggcagtaacagcaccagtagcggttgtagaaataacagaaccagatgcggctggggtgatcacaacaacaacaacttcagtagaggatgatccgttgctattggtgactacagttgtgaaggtcgatgtggttgggacagtgacatcgccagtggtagtagtagacaaggtagatggagctggggtgatcacaacaacaacaacttcagtagaggatgatccgttgctgttggtgactacagttgtgaaggtcgatgtggttgggacagtgacatcgccagtggtagtagtagacaaggtagatggagctggggtgatcacaacaacaacaacttcagtagaggatgatccgttgctgttggtgactacagttgtgaaggtcgatgtggttgggacagtgacatcgccagtggtagtagtagacaaggtagatggagctggggtgatcacaacaacaacaacttcagtagaggatgatccgttgctgttggtgactacagttgtgaaggtcgatgtggttgggacagtgacatcgccagtggtagtagtagacaaggtagatggagctggggtgatcacaacaacaacaacttcagtagaggatgatccgttgctgttggtgactacagttgtgaaggtcgatgtggttgggacagtgactgaaccagtagtggtggtggataaggtagatgctgcaggcacagcaacattataaataatttcagtgacagtatatgcgtactgattagttgtagatgttgttacagtggcaatagtagtagcttcagtaatgaaatcctcagtagtaactgttgttgtctttgtaattgccccagataaccatggacatataccatcatacatttgtgctatgtacatataagaaccatgaatttggtaagaaggatctaattgttcaacagaaaacgactcactcatccatgttgatccatctgggcaacttacattaaaccagtaacgacgaccatctagtgcaacattaaggtttgcaacatttgctagactgccgtaattctcgttggaccatttggtataattcatacctaagaaaacgaactctgatccaacaaaattcacaaccttaaatgaacttggtacaacttctggattaatcaaatacagacctttattaatgtcgaaagtttgttctcctaaagtatatgtgttaagaataaccatagctcccgtattaccagtaactttaccttgaccctctataggattattaaaaatgatacctttcatagcgtatctgctaagaggcgtctgatttatggccgttaatgaagaaaacccgccagacttaatgacaccattattagttatagtaccaaggtaaaggaatccatttgttgtaccacctttatcagctgtatcatagtcaatagtgcctgtgttaatgaaggaaccagttggagctagagtaaagttagtacctggcacagtagcagcagcatttaattgcgagacagtaaatgtaccagagttatcaatacttgcaggtgcaataacaaaatcactggcagaacctgctgatttaatattttcgatgttgatgttaccactgtttgtgattgttgtagtagaaccaaattgtaaactagttaacccgtttgttgaatcaccgacgatgtctaaagaacctttaacgtcaatattgccattgaaagaatatgaagaaccagctactaatgcaagagtagcacctgattcaattacgatagcatcggaaaacgtttgatcacctgacaaggttgtaggtgccgaaatagttgttgtagcagcactgactttggtcacaagcaatcccaatagtgaccacaaaattaatatctgcattttaataatatcaaacgaataatgtctaatttcactttaccttatccaattatcttttcctttttttttttttttattttttttttttttggatgatttctgattgtagatgtctcgagggaaaaaaacccaggaacagaaaggataaaaaaactatttatgcaatgcgttaggaattaagaggtagaagaaacaaagatcaatttgcagactgtacaaattcagataaagacagacacttatatatgtttattttgtaagtttatatgatacataaatcacagacaataatatcaaaaaataaaacaagaacgaccaataagatacaagttcctattttagatatatacatgcaggcacgtatgtattatactttgatcatcccgaattagtgttttgagtgatataaaagaattgtgtatcctattgtttgtccttctatttgtaagtccgtcaaacccctgagatggaaattttgttgaacactcacctcttgaaaaaactaaagtggggttttttattgtacagattttgaatttttctttttctttatctggaaatatgaacacacaatgattttttttgttcctgtttagcatagaaaaatgtgaaaatagggttttgacttagttgtagaatctagtcacaatttccaataataataggtaaatactcggtgtatattacttccttccctctcaagtattatatttaagataaaattataaattatatacctatatgttactatttaattgattttcaggaattaactaccaaaccactttattaccaaacttacggatgggaaatgattttttttttctggtgaatttgctaaaaaagggtgttctagaatgaaacaaatagaagaataaggatttactcaatgatggatagcggaataataagtaatcattgcttgaatattcctaaatattgttagaattatttgattaattttttttacagaaaaaacttacttaatatccacatatagatatgatgaatctaaagatcttcttcgatcatatttctactatatatgtactttttgcccactattaaccacataatacttatagatattaattggaaacaactacagattttgttaaatagcataaaataagtaataattgctggaatgatatattaccggtttgagtaacatgtaaaatatattaaagaggaaaaatgtttgttttgcacattcaatattacagagataagatcaagcagaatcaaaataaatcaatatattatgaaaaattaccaaaaggcagatatatataagtagacgactttacttattaattttccaatctggatgaataagttatatacattttatcatatgtttcttttgtatttatataattattaattccgaatcaaaagatcgagggaaaactacactacatatcaacataataataattcacaataataacatatagtatgatcaccgacgctaagaacatgtatactaatattattcagccagaggatggtagcgttcgtaaaaattcgtttgcagagatcaaatcgaagagtgaaccagtcactccgatccaaggcattcagggatcatatgaacaaactaaacagaacacaaacaaagctagtgaaaacacacaagctccttcttttgttccctccacatatccatatccatatccatacccaggtactccatcatatccacatgggtatcactacccaccttatcctatgggttatccacatgcattcaacccatactattattatcccccaccacctaacctatacttcccaccgccaccgacaccagtacaatcacatggtacaccattacaatctaatggccctaccttacatgacactgatgaacattcagtctcttcatactcgagtaaccctatatcaactgttactctacaccaagtttctgacccatcagaatttccagactttctacaaaactttcaaaaatatttaaatgatataaacttatccaagatatgtataaacacagcacaatctaccattaccgatcaagaaaaacaacatgtaacacatatttttagattatatgttaaccctaaagcatatcctatgtggttcaaaaacgaactatcggataactatgtctctttgtttgatttaattcaatgtgccattataaaatacaataaaaggaatactcctactaaattatatcagcaactacaacacatccgttacgacccaaagtgtgatcctatgttgtttaaaaaaagaataaataatatgatacaacaagcaaaagattacaatatcgctattccagataggattttatgtgatacgatcatacaatcgttacacggaccttatcaaataattgttgataattacaatcgtaactttcacaacattacattgaatgacattttaaatgatattatcaacatccatagtcgtcagccacacccctatccaaccaaacatcacaccaatacattatcttctaccaagccaaccaatcaactcaaaaagccaaaaaataaaaagaaaatttcaaacattcaatgtgagcaccctattgaagaaaacacacaggatgactccccagaaaatcttaaagactatctagtccttgacactggtgcagaaatttctgttattaatgacatagaatttctaaaccatattaccgatgctaacgttgtcctatatgccgcaaatgacaaaccaattcctgctgctgctagtggtataatatcactaaaatttcaaacccattccaaaccttacgttataagggctattcatgctcctgacatatcgaacaatttcattagtacataccaattggaaaaagccggtattgtagttgacactcgtcatcgccaattactagacaagtcggaacacattctgtctcccatcattaatgtgggtaagtacatgtgtatacctcgatcaattttacaaccatctaatcaacaatctacttcatacagcataaacaaattaggtatcaaattaactgtaccttttctacacaatttatttggacatattaatgttcatgatattaaaaccacaattgatcgaaagatgatttctggtatcacatcagctgatgtcgattggtctggtattcactcctttcgatgtacatcctgcatgaaaggaaaatcaactcgtcacaagcatattataggttctcgtataaaatatcaaaaagaatatgctccctttgaatatatccataccgatattttcggtcccatgtcacatctaccagtcggaacaccttcctatttcatcagctttaccgatgaatctactcgttttcgctgggcttttccattatattcaaaggattcacaaaatgttactcgcatattttcaaagttcattaatatggtgtctaatcagttcaagaccaacatcctatcttttcaaatggatcgtggttcagaatttacaaacgatcagataaccaaactcttcgaagataaagggattaacccaatttatactactgctggtgattcacgagcaaatggtgttgcagaacgatttaatctaacttttttaaacgattgtcgaacacttttacaagctacaaacctaccaaattcgacttggttttatgctgttcaattcgccacactcatgcgtaatgcattttttaactcatctattaaaacttcatcaagagcaaaagccggtcttgcaggtctggatgtgagtactattcttccttttggacaagaagttattattcacaaaggatcaacaacatccaagctttctcctcgtggtgacgacgggttggcattatgcccatccacagtatctcatggatacttaatatataataccatcaccaaaaaagtggttgacacatccaattattcaatcgttaaaagttcaccatcaaaaggcaccacaccaaaatccacagtcttcgacactctaattgctatccacgactaccccgagaacattgaaccagaatctgaaccagaaaaaattgacattcctactgagaaccaattaccatcacatactaccgcactaccatcagttcaacactcctctgaaaacaatgacacccttaaagaagttgacaatctaattgattccatcgtacatacaaactccaattatgaatctgatgactatacatcagaaaatgaaagtgataatgaaaacgaagctatatcatccacttcgcccattcaagcccagccaatagagcacaccccattgggtggtacaaatttatctaattcctccaatctatctcctgattccacttctttagctaatccacaaaaagacgctgtgttgggtggtaaaaataccgatgctaaaattacgaaaccatctagtaagaaaaacacagacgcttcaagactagcaaaaaaagctgaagaatatttaacgaaattctcaaaagaatacaaaataagcaatattcgtgctaatcagagatcaaatgaattaaatagtgcctcccactcaataaactatagagatgctataataaaaaatactaataatgactcaaaatatttgtataaattggcatatgaaaaagaaatcgaacagttaaaaaaaatgaatacgtgggacgaagaattaatcgatgataagaatattgataagaagaaaataattaatacaatgttcatattcaacacaaaaagagatggaacacacaaatgtagattagtagcaaggggagatcaacagaagaagggaacatataatgaggaagcaacatccaatacagttcatcactatgcactaatgactgtactttcaaatgctttaaataaaaacaaatacatcactcaattagatatttcatctgcatatctttatgctgacctagaagaagaactatatataagagctccaccgcatatgaatttgaagaaaaaggtcgtgcgattaaaaaagtccttatatggattgaaacaatcaggagctaactggtacagggagatatccaattttttgacatcaaaatgttgcttaaaagaaatatcaggctggtcatgtgtgtttataaatgagaaaattacggtatgtttgttcgttgatgatatgattatcacatccagaaaaatatctgacgcagagaattttatatcaaagttacaagaaaaatttgatacaaaagtcataaatctaggactacctacagaaggtaaaacagagtatgacattctaggtttagaagttaactatatgtttgataaggaactatcctttggtatggaaaaatccttaagagaaaaactcccattattggatgtgcctctaaacaaaaatgggaaactattgaaagctccagggcccccaggaaagtatattgaagaagactatgtaagtatatctggattagagtacaagaaacaagtaaaatggcttcaaaaaataattggcctagcctcatatgttgctcacaaatatcgttatgacatattatattacgtaaacgtaatcgcatcaaacacattattcccaaacaaagaagttaaagaattagctagacttttagtgcaatatctatgggatactaaagagaagaagcttatatggtgcaagaaaaagaataacgaaaatcaaattatgctaaacgctattgctgatgcatcatttgctaagcaaaaggaattcaagtctcaactaggttactacattaaaattgatgacaatataatcgctggtaaatcaacaaaatcaaaaacaactctaacatcaactgctgaagcagaaattggtgctattggattatctattcctgtgttgaaatacatcaaattattacttaaagaattaactgcagataaaataatcactacgattgaaacagatagccaaccggctatggcagtaattacttccaaagaagataaatcatttaaaaataaattctttgggataaaagctttaaggataagagatgagataagtgagaataatctaagagttgcaagaatagatacagcaaacaatattgctgatattttgacaaaaccagtgacatacaagagatatagtaaattaacttcagaatggattgtatgagcagtccaaaatttgggtggtatgctggattgatatattaccgatttgagtaacatgtaaatatatcaaagaagaaaaatgtttgttttgcacattcaacgttatggagataagatcaaacaaaatcaaaataaattaatatattatgaaaaattgccaaaaggtaaacatatataagtagacaactttacttattaattttccaatctggatgaataatatatatacattatattgtacggttcttgtatatttatataattattaattcccaatcaagagattgagggaaaattacactacatatcaatataataataatacacaataataacatattgtatgatcaccgacgctaagaacatgtatactaatattattcagccagaggaatgttattattgtgtattattattatattgatatgtagtgtaattttccctcaatctcttgattgggaattaataattatataaatatacaagaaccgtacaatataatgtatatatattattcatccagattggaaaattaataagtaaagttgtctacttatatatgtttaccttttggcaatttttcataatatattaatttattttgattctgtttgatcttatctccataacgttgaatgtgcaaaacaaacatttttcttctttgatatatttacatgttactcaaatcggtaatatatcaatccagcaaataagataaattaagacacgtaaatataaaatctaaaacaataaagtacagaaataacaacaacctaaaaattgaaagtaatagatctactgactttgaaaacaacaagaatatattcaatatttgagtaaaaagaaaaaaaatagtttactaaatattttaataaaatattgaatagaatagaaagaaacataactgtatgattcagaattttcccaaataaagaaagttaacatataaataaaattatttatttatatacaaagacagatataacactgctttagctttattttggacaacttactactttggaatctactttcaaagatatcgttcaacccacaatggatctcatttaagtgaagattccaaatacgattctaattcatatctattcctttggttataaatttatatatttacacaaatgaggatgttgaaatttaaaaggtgtggagtaataacctataagttataacggaactttatgaaccgtatttttataagtaatcgctcacagtattaaataatacatatattatatacaaaactatgtagtacgtatataaagccgtgagtaaaagaaattatttctaatttctatatcttgactatttatacttttcagaaagttaattttgagaaaaaaagtttttcacaaaattttcattgggtctaggtaatatctcaaaagaggatatagtataaatatcgtattatgataatctttttaattttgttcagatgtaatatacaccctcttattttatttattaagtttattctaggagaatacttcaaacaaataaatgagatttaaaatcaaagtccaaggtggcaatttttaaactatatatgatatttcaaatataacagtcaattaaatacattaatccaattaggagaatgtataaaataaactagttaaaagttagtagaataaagtgtctattctaatttatacttttaatacaaaactagaagaaaaaaccaaacttatctttattgtgttactaatgaaacttaaaaagaaaaataaaaatcaataagttagtataaagtttatatatacctaatatattatattattttcagaaatgatattgcctctcttccctaatcatctgccatatttttagcagaaatattaaaatataatcttacccatttttatgaaaatttgaatagaatgttagctttttttgttgtaaaaatacctatatttgctttttattcttcagagattattaaaacttcaaatttattaccatataaagtattagtaggaaaaacattaattgtcattgagttatattaaataaaattatcatcttttccttttattatctaaatatttttttgataaatgacggtcagtttaatggtaggattatacatattttattacattctacctcgaagtcatgtaatcaatgtattttgtattcttttatcttcaaaataaacaatgaaaaaaaataataagtaccggtatataaaaagctatttttgtaaactgcataacattatgtataaaaattactttgagaagcagacaaaataataagctatctggtgccacctatggaatgtaataaactacttcagaagaatagaaaataataaacaagctagtgcccatttacaacttcaactttcagttattattaacgttacccctgttcaatttttatgatcctgagtaagatgatagaaatttctatagtatatatgttttactgaatgattgtttaaacaatacatataatggtaaaattactaatattgaaatctaccaaagaattcaaattaggtattaaactaattctttttatagattcagggacattcctattcaaaatatctcgataaaaattattagttattctatgtcttcactaacacatatttatgtcttaactagtttagtcagtaaatctgttacaattttcataaattttttaatcgaatttaatgattgtagccaacatgataattttgtattcatataggttactagaactgattttaacataaataaaactgtatacattgtttaagaaagaattgctactatccttttaaaatggcttacattcattacacacaaggaatcaaattggaagtttcgatccattgaacagatagttttataaacgatactataaatattcatctttactatatcccaaatataaatgcctttatctattcacctatatttgttctgtttgatacaactgcagtatacatattaataatatctgcaaaaaaatctacggaaccgaatatagaaatgatatttattattcccacaatcatagctaaatcaagagttaattagtataacggtaaggttaagattcttaactgatttcaaaacattgtcctaggcaatgtatcccttctatattacttgatatccgtagctaaacaaatgaatttccacaccataagaagttgatgaaatatgtcaagtttaacgattcatcattatcctctttagatttaggtgtaatccagtgtagtgaaatgaaattttttaaaaatctatttcctattatatagcataattaaaatgtttcagcaatttcatataagtggagtaattcaaaaaaagttttacagtaaattagttgacatttgtttccttgattagttactctaaaccatctatttatttaccagattaggataatattgtacaggatttcaactactcatatgcactggaaacactaaatttatcaatgtctctcctaaattataatgttgctctaatgatattatcttcattatcatcaataactgttgtaggatatcaattaatatttatctggacttttttcatttttatattcattcaactgggttgtcttactgttaataatattgtaggtttagtttttttaagattcctttctaatgtaatctgttgtttttcattaactcatgtatgtggtggtatttttggttatatcactgaaaagtattcaataattatgtaagcctcatggtcattttgtacagttttaacttcagttatagcttcgttattaaatatgtaaatgacagtagttagaatttggagacagatatttttatttttttatagatgaatttgaaactgtaattacttttaccatacccaagtcatcacctacagtagttttatcgaggttattagaagaataagaaaatggataagtagtccaagatattatatcattcaagaaaaaattgaccccataatgaaaatctatgaatttttaatcgatactttatataaaaaaatccgtataatttttcagaatctcattgtattggcatttaatctttatttataagttatttataggagatttcgaactttttttataagcatttatctttatatttgttgatgtttatcattttttattaattgaattaagttttattacacgtagaatattttgttcatgctacaacaactttcaccataatggcaacattcacttataaagtagttaattttagtagaaaaaaatgaaaaatttattccaaaagtttatgtattacctccaatctactttggatggttgctactcttagctctattttttgtattgttaggcttctgctgtacattggataattctaattatatctgaaggattatttcttactgtttcaggaaaggtatttaaaacaacattttcatattttgcagaaagttatttaaattgtaataccatattctgcactgatactaaattaataagatgtgtttttttccttttttttttttgcacttgcgtttttgctgcttgataaaaccatgcagattaaatttgctattaaaaagtgttctgttgtatatagatctttgttctttaattctatcactagtgtattaactgttactctttttgtccgatgtaaatatggtctagtgctaagattcaattctaaatttgtaaattaaaatattatttttatttgaaatcttaattatgtaaataaatatgctatcttatgaaaatttatatctcttgtaataaaatacttaatgcgctatatccagtttaggtgttaatatgatataagatgatcaaagatattgagttttcttgaatttatgactactccataatctcataaagaagatatttcaaccttataacacctgattgatgtctaagttttctaactagatatatatacctagtatattgtgtaaatgaatgctgttccactatttgtagctaactcatagataaaaattttttgagttagtcttaattcaacttagatctgtactaacaaagagtgtcattgtaaataaattatttaagtacttagaacaaaatatatgatataatatatgagattattaatcttataaaaagatcattgtagaaaatatccaaagatatatagtttatagaaaagaaggttgaaatagtatgttttaaagaaaatgaaatatcttggtagattcatctaaaacaatgtaagttgactattgatcatgttatttcagttttaatctctagtttcttttagtctctagcattaaaagtgaaccacagaggttacgacgaagatgtagtttatataagatgatctcttttttgcttatctttcaatcatgtaaaggtgtcttgaataagggctgatacagactccaacaattcaaattgttaaaactacaaaatacacaacagtcccaaccatacatctgttggtaagttctattacttttttctattctttgtatgtgaaaaaaataagcaatgacatatcctattgaataccaagatacatacttttaaaataaaaaaattatttgtttggcattgcctagcactagtgataactatgtggttttttagatgatcaaattcgactgactgaaacttgttttagaagcttccaaaactagtcacgttttgtatttactaatattttcctttttattttttttacttttttttgtcttgtgaaatttgacatcgaacatgattttctcgtcttattgtttttttccgcacgataaaatgtttgtcatttctccttccacagtaatttaacaataagatacagtgtgacacatccagacaccacaagaaattattctttcacataaaaaattttccatttcaaaaatcttcagaaaaaacaaaaatgatacaaaattcaagaaatttaagacctagctacaaatgcttttctttatgtatacagaacaaatatatattcaaattaaagctcaaatgaagtgctatttaaaggtctaatttaatttaatatctaatgaatgtgtaaatatagtaaggtatgagaaagaatcatactacaatcagagtaagtaaacagcgtaaatcctaagttatttgttttttggacaccaactcttctactatcgtatattgcaaaaaggaatattgaagattttttgtaccaatgacaaacatctaattttattggtctattaatttattgtcaaacaataggtttacagctctttcttctgtaataaaacgtatactcaaccaacatgttggaaaagtaaaaaaaagaataaaaaaacttaagcaatttcttgaacaatacgcaacttttcttgccagagacctgagtcacacacttttttctcaataaactattattttctttttattattagatatggcttttaattttttttttccaatttggatgaaggtaggaaaaagacaaaaaaataaaatacaatcaaagaacaatacattcaacaccaaataaaaaaaattctgaaaaaaaaaagaaaggaaaatatgagaaacagaagttaatacatttttgaatgaatatataaacagtgtaaaatattcaatattttttcctttcaaataattcaaaatatagtcacaacctcttttatccctctaactgttcaattattgtttgtattgtcattaccacccatttctatacacactgtatcgaattaacaaagtatttccttaaaattaatcaccagtccaaggcagtcattttagtactagctccaaaatatataatagtcatgcttgctgaaaccatgccaacaactatcaaaactggaatagaaatttcagaaaaaaatgagtcggtcgatactaggtccacgaatacttattctgaaaattcttacttagaagaatcaaagaattattcacgtgacattgaatctctaacattaaataggtcatttttattcaactgggtgtcttctatgaaagcagaagtaaaaggtatagaaccagttactgatgaagaaaagacagacacaagcactcttagtgcggcaaatacatggttttcttctagtttagtcctttcctcgtatgctgtaggtgttctaggtccctgtgtttacggactaaacttcggtacttcctgtttgactatactgttctttaatatgctaggttctatccccgttggttttttttctatgtttggtgccaagacaggattgcggcaaatgattttaacacgttatttaactggtaactacacagccagatttttttctttgataaacatgatatcttgtgtggggtggtgtgttttaaacacatattgttcggtacaactactaaacatggttaaccacaatggacacaattgtccactatgggctggttgtttggtcattgcccttggcacaattacagtttctttttttggttattctatgatccatcagtatgaaaaatggtcctggattcccaaccttgcaatattttttgtaattattgctcggttgaaaatatctggtaattggagtaatggggaatggccacacggtccaaccacagctggaggtgtattgtcttttggatctgctgcatttgggtcagctgcatggaccacatatgcttctgactacactgtatacgttcctcgtaatgctaataaggccaaaattttcataaatgttttttctggattaactatatcatcatgtttttccatgatgttgggcgctgcttcaggaatgggagcagtcaatgatcctgagtggatggaaatgtataacaaaaatgcagctggaggactgatctatgctatattagttcccagatcattacatggttttggtcagttttgttgtgtggtcctagcactatctgcagttgctaataatttacctagtatgtacacaattgcactttctgctcaatctttatggtcaccatttgaaaaatatccaagggccatctggtccattgctggtaatttagtaatgttgggactagcaattccgacttgctattttttccctacatttttagagaattttatgaacacaatctcatattacagtgcaatatacattagtctgatcttatccgagcattgtattcacagaagaggaaagtatgaaagctatgtggtggaagattggaataaccccaataaactaccgttaggaatagcaagtgccctcgcatttttcgtcagtgcctttggtgttgcactagggatgtgtcaaagctattgggttggaaatatcgcaagattaattggaaaaaacggtggagatataggatgggaattgggtgctgcttgggcttttatagctttcaatatacttagaccattggaaaagaaatttattggacgttgacagagaagtaactatgttgtaatcaattaattaatgtattttttgtgatagtattatattttacctgtatacagaattgtagatatatacaaaataatttaataatatattgaatcgaaccaaccacattcataaaaataagattccaatataatccagtataataattatatcatggtttgggatatctatatattcatatagtaagaatttagtaaagtgtctgaacattaaagttggtggtaaagttattgaattagtgaacactggataaaatgatggtcctttatgaatatatccaattattacatgacgaaacttacaacaatatttagtaaatataatacatcaaaaaaattggtcaacagatcaacacatatgaatgaatgatagtttgtaaaagatttgtattaaagtagtaattgatttagtatggatattacaacattaactccttgttacagattcattaaaaacttactccctaaatagaagcatacatgggacaatatcaactagaatctaataaataagaaacaatgattttgccatggtaagtatttcatctactctctttttaacagtatttcattagaagattaagttatacaaatccagcacttctaaattaaatataacaaccataactgtactataaaattaatggaattcacaatatcccattttatataccagcagacggtataaaagatgaaacaatttacttcatttcgacaaaatatatctcagaaattaccatcttatatcgttatgattaagttgttttcaccttagaactttataactttattcaaatagttatatttgcttttagtcccacaagctattcctatttattatgcattatttactgtttattctgttaaatatagtattttaggaatagtttattaaaataagaagttaaataaaccattgatatcaaggtacttaaatgactgtatgcaattttcatataataattattggatcgaagatacccacattaagccatataccaattattttctcctgtcaataatcgtaagttgaatttggattttcaggactcttgatgaaatgagttatatgacaaaaaatatacaatatctgctgttaaagtttccatatagctattgtcagacagccggaatggtgaggtcttaaaattcatatcaacgactagttttgtaaactgattgatctaaatcatcttacaataaaagaacaaagtctgccaaatcaccatattcactgttaatttcaataaccttcgtgtcattttgtcaatatagtcaaactgacaccctttatgatcgtcctatgtgtcagtcattgccagatctaatgctacagaaatgctcctatgcaataaagttgccggtggaaacctcgatattcatacatactcaacatttacattagaaaaaccttcagcatatcttttattggctgccttatatagttaattaatatcttccgaccaggtatgatcatttcttataattacttcctattctaatataagatgacttacagttgctgaaatactaattactgtacaaacacatccctgttttttcaacagcacccaaattatccttactgaaatcaatatgtggagtttttaggctataaagaagcatatctgaagatattattttttattatagttaaaaaccatcatagttctttcttcttaagagattcaataaaagttaaattaatgaagaaaaagtagcagatgcccagacaactctataaatttgttcaacatttgacggatcaacaaataacgccgtatagaaattagaatttaatagctagaacagacttacctataatacagaactaacaatattctacaactttttaaattcatcaaaatcaaaatgcattttatcttgaacttttaaagcaataatacaacatattataaaaacaaataaggagaagagagcagaaaaaagaaccgtgcccataatctgtctcattgtgtttttcaattcatatgaccttttttgaggattatcttcaaactccattattcccatttgcgaagtaatatttacggtaagatataataaagtgaaaaaatgttcaataatttgcggaattaagcctattttagtggataactataagcttactctttttaaactttttaatgtattcttggcaaaatgttagttatatccgactttaagtaaaagagatgtggaatagcaagaaatttcccatgtattttgatgtagttttttcaagagtagaagcttaaaaaaatttagaatgagttgtttagatattcgaaaatgatcaaggatcattttgaaagctgaaaaacaaaaaaaaagtatgttaaaacaaatgttaagaagatcttgagggcgaatctacgatgcttaaatcaactttacaagatcaggctattttttgcgacttggtaattaattgcaaccttcgatgatagacaaaatcaaaataaggtaataaaaaattaaacttattgaattactatttgttactctatatgcactctcgaccagcacaaaacaaataatctataacaaataatttagacaaaagtaagactagtggcagagatacacactttattactacttttattggttacttttgaaattaatcgagcccagaagaaagtaatgatgaatgataggaactatgataaagagaatggagaaattcaaaaattagaaaaattttcgaaggatgtgtgtttcttcctaatgtttataaacatgatgctgcttatgattatggtagtcaatataaaaatgttttactctgtaagaagagaaacagaaactacaatcgctggaattaaaaatctcataaaggaactcaaaacagatacgttttaatctgtattcttcgttgagaatctacttctcaaattatttttgattagtcgaccaagattggtctaattaagatatgtacataaaaataaacaatttcaccaatattattattattatgattattattttacgaacactacatatatatcagcggtctctctttatatttttatttatctgctaaatgactattcgaacatacaaaatcattcatcaagagatcatatattcaaatatttttttatacacgacttgtgacaaacttgcagtatatggtagaagcttctattaggtaagctttgttttaaaaaagtgtataaaatcgcattctttatatgaaattgaatacactgtattatcaccctagatgttatttgcaacaatgtataggaaatatcgtatgataatatcagctatccatcacaaataataattactgtatatggatacaatttcttttgtttttgttactcgtattacaatatttattatctatacgtgtgtacatgaaatttgcgattgtagtaattaaataattatgtcaaatttagtttcttcaaaactcaattagtgaataggcatttataccatagtatatggggaatatacaccggtcataactatatttatattaagtatatcatgtaatgttaattttggtgtaccttttctagtgctcatcagtacttcattagaatgaggttaagataaaaatgataaaaacaaatattatagtatttatattctgtataacatgtattccattatacaaattgaagatctatccaatccagtatagttgtatagggtttaaataataactgatctaagaataattctggatctctatgtgattataggatatcgatattgcgtgaactttccattcaaataaggaacatgcaaaaataatataagacaccgatattttctacaaattttaatctatagatatagtatatcttattgtttttatgattacccataattacttgttacagttgaaagtcaatccttagtgctaaacattgagccataataacattagaataaattctgaaaaaaaccaaaatgcgccgattatttctttagtatagaattgatagttttctatgttattattctactacgatttcttttccagcattgttcaatatttaaaaatatagataaacactcttttctctactatcatatttcttaaagatcaaaaagaatatggtcatatgaatggagtatagaagaaaggctcatgaagagggaaaataatacagtagaaagaagtaaagatataggttatcaaaatatgcttaaatagccatatttataataaaagtagtagtaacaataataaatggttatggtctattaataaatgccttccttagtcacaatctatgtatgaaataagttgttataggggcattctctatagtcatttatgaatgattattaactagatggtggtataactataccatcttaaatagtggtttggcaatgttcaatattatatcatatgaatatgtaaagaaggtagataataactggctatttataagtgaagttggttacttatatacttggttgtcgatgagtgtggctattattgttgttaatttttttttcgaactattttttcaaattttgacacaaggaaaattgacaattgaaatttgaatgaaatgagattggtgaataattaaaagataatgatggttgatgctaagagtaattaagtgtgatttgtttgtacagtatcgtacttgtctaagacataatatcaagagaagttgtatattaatgaggagttcatagtttaagaatgataccatacaatctaccagttattaatgtctaaatgaagtaagcagtttaagaataaaaacataattgaaagtaatagtggttgatatgaacttagtctactatgtataaatccatagtaaagatacatgctaatatcatgatgacagacactgtgaataacattgtatgttatagatgtaaaagagcaataaaatttactagatgatatcacgataataaacctagaaatgtgaccatatatgtgagatgtaatagaataaccattgatgaatcagattaatccagtgtattaagtttacgttgtttacatcttttctacattctacatatgaaaagagaatggtctaaatttattgatctatttatcataaaacaaatgactctatcgttgttatttttattctttcgaaaattgtagttcactcatattttgtgatttaaagaaagagatagtgatatatatgtttcagaaactttttagagagagcttattgttttgtttaccttggtatagttggtggattaaatataaattgttcatataatcatttgacatgggaaataatttttgctctactcatgggaaaagatatcttggacagtttttagagaattatgagaaatattctatgcctaataatacaaaattattttccagaaaacaagatcgattcaaaaacaatctacatgttctatatgcagtgaaagccacaaatttgaaaaatctgcttacgtttttcatttcaaagaagactttgataaatagatttatgttaaacactataccatctttctactgtttatgatcaagcatttatcctatgaaaatatttaaaatgatatttaagttaaataatcttaattgtttatggaaatataattttgtagatttaacatttgaaattagagtttcagggatgctaatatggcatttcttagaatatagtagacttaaagtctaacgttgttatgttttaagtatttagtaaattggatttctcgtttattgaaaacccatgcaaatagtatatattgtatttattattaaatacatattaatcttgcaaaaaaattaccaacgatctaccaaaatcagtttttaacaaaaaagatcttgtgaacatactatatattgtctaattatattatattggactcaactatatcataatccaatgttgataattatccctacgatctatcaaactggatcaaagacctctttaagtgagctttaatataaaatttcctacgtggattatttgataatcgactacaaaaactcacacattctaatttgtattattgacaacatcatttctcttatctcatcatgtttcagaacatcacacgcgaggattaaatagttacaacttaataaataagtactcataatgaacctttagagcctagcataatttttccatatttgtaagttagacaatcaacaaatattattattgttgtttatttattaaaacaggtctcttagcactgtggtttgaaatataaataaagatcacttctctggagaacttgtaacaactctttatttatatataattacaactgtagatatttataagtttttgtaatgttttgggtcgatcttctcatcacaagattgtatattaaggtattcatgaaatcggatatcttgcttcaatactatttacaaaacgtgaggaattaatactagctaaatagatataaacagaatataaacaacaccctaatacttttgattctcaaaaaacttgtgttttaacaacaatacagccaaaacagcataaattaacatattcaagacctcaagaactataaatatacgaaggattgatatgacatttcccaaactttcatgatgattaaaccaaatgcaagaatattattaagaaagtattgtcaaaaaaacataaaagaaaaatcaaatattccccatcataccactttaaaagtgttcttagaaacaattcaaaaaacaaataaatacaacagtaatataatcatagattcataaaaacgaataggttctttctgttttgtcttatccttgtagaaaaaaaagattgataaaataattatctaatggttgctattttgtttattgatgtttaatacaagattttacaaaatattttatcgattgttacgtgtctgcaaatactttcatgtaatggaacttatcctgatgttaacataataattttattgttaataagatccatagggatataagaaatttataagatgatgtattgtcgtgataatgaaatacattcacagatatctttatacattcatgttggggatgatatccgaaggtaattcttactatagaataaggccagcaacaacaagttaaaaactatatctgagtataagtaagagtgtttgtataactaatacagaaattatatcaattacagaaaatgaattctttgacaattacccatatacaattcatatttttattctcaagagtactatggtatagttcatttgaaaaagttatgacaactactgttctagaaaattaactgtcagaatgcaatgatctttccaaactcaaaaataagagagaaggaaatactttcagaaatagttttgtggattgtgatttctttgaataatagtaatagtcatagcatatgaataatcattctgtaaattcatagttgcctctcccacacctcacattaacaatatatattttattacagtatattaaagttgttaagaattggtgctcatagtcattggataaataatgaacattctcaatactgtaattggataaatatatattacaaaattgtattaaagttcttccatcttcttctgtatgtataacacagaaatgataatatgtgaaaagtatgcgggaaaagaaacacgatttgaaaaaatgttgtctttgtgtatgttaaattttgttacttctcttctatgaatggcaaaaatcaagcaagcagtattattaacattttgtgacatgtaagcaacagttcctcagcattccagtggtgtcatatgttggaatctcattgttccatttgtttcattctcaaatattctatttcgacgacataataaaagtaacagtataacacagaaattgttaacattcaacaacaaataatggagttataaaaccacaataatttaactgaacattaataaataatccatatatactaacataatgaaaattcaataaactagcgtagcaaagaacactttagataaacttctatccagagaacttgaaatgctaatgtactttatttaatagttgaactatgataatatctaagaaggtatattgatattttaaaaacacaacatatattatcacactatgaatatataccaatccatgttagaaataaaatacaccactgcatattgaaatccggttttctatttaatgaaagttccaacatcactatttagagataattactaccaatacactcttctccttttcttctcttaatctacttttcatctcatcgttgatggaaaaactgctgcagcaaaaaaattctgtgatgacatcgagaaaaaatagttaaaaatttgaaaaaatacaaagcacgtaactgtgttttgactagtatatttctttgtgagtgttaagtaactagtttaaacaatgaatgctacgattagaatatatttcatgttatatctgctagatttctccagtgtggttcactctatactttcccactagccttttgaaagtatttttctgtttatttactgtacactagaaagaacgagtatacaagaacactaattataacacttcaagaatgacactgccaatttaaaagtatattagaatatcaatcacccaaggattgaagaacaacccggagtaatgactaatgtgcatacaatttgaacaaatacaagcaacgatatttaataaatatattttattgtagttaggttaagtcatataaatactatttctagagactgtatttttatgatatttcataacaaatatacaagaagtaactaatgtgatattcctaattgcatattccatttgatgaacactatatagggttcttactggttcaaccaatcaaaaagcaaagttgtactagatgaccatattgtaatagaactagttgaaatattcacaagtacgtaccacatgaactatttgaaatattgtgtgttatttttcttgagctgagtgggttgtatgcattcttaagtattatatttataatgtattaaaaaacattcaagatataagacagctgacaaatataatagtggtattctataataactactttttttattgtggaaattttattctgatatataacaatagaagtaacatagaatataaggtataatgaaagcgtgatactttacaaagattagtaaaaaagtatggaaatatgatgatgtatcagtggtgagaagatacgtttatccaaaggttataatattattatgaataataaacacagaataagttatatgaaacaattattcgaagaagagataatgtaatatatctgaatttcatgaagcaaacagatggatgtgaaaaaatagtagtttggtaaagttgatatttcattgtcatgataactcttgaaagagagtaagaatatatatgttgaaatacaatggtaagaaaagagaacttctaagaattaaataacaaacaaatgaccaatataaaaggggtattaagatgttataagaaatgataaaataggataaataaagtgatactgttagaataagaaattgattggtaaaagaattaataacagtgtgctaatggagatcactgtctatttataaataaaaacaagattcaaccatgaaatttttgaacaatattagattctcgtgatcatgctttttgaattttattgaactaatttaaagaggaaatacatatagaataggattagatgtaacatagttgagtatattgtattttgttgatgtgcaggaattagtaaatgaaagtgattgttgattgcgaatgcacatgctaattatttccatatgatataaaaagatattactatgcaaatagtatatcaaaaaacaaaacaagatcataattcaacaactgtatggataagaataattgtatattgctagattgtgataaagattaaatcatataaacaaataaagaattataaaggtgttgaagcattttcattgtcaattaaatttggagataatatactggcaaaaaatacggtaacctaagtaagtatgtattgttgtgtgttcttgttgctagaatcatattactcttgtgtttcttgagatgatatttcagaacttgtaaaatattattattaaaaaatgaaaaaagaagtggactataaaactatgaggaagtaaaaataactgcaggagtggtagttgcttaataagtgcttgttaatagaatgaaacaaatgtggttgatatattgcagatgttgtgatttagtttgacacaacagatctgtaatatgaagtagagtgtaaggagattacattcttgatattgtgataggcgtgaacactaaatgatacttgtatataacgagaaatgatgatatatcaatatgtgatattgaaattgtactgtatattcttaaaaattaatatttaatggataatggtaatgagagagacaaatatatgtggttatatgtgagatcagtaataaaaagaatgttttagagtgtactgttgagatagtatttccagtaagtgtgaagtggaaatggacattcaaaagtaattatataccaaggtgtacatatatttaaataacactactgtgttgtcagtagtatcttatgtatataatctagtattagtagtctgcttcatacgatatattattcttcacacacatggatcctcatactattttatgaacatatcaatactgtcaattgatatatacagctccttatatcgtgatttattaactatccttataagatatcttaattattattaaataacagcacttactaaatatactataccatatggaaatataggtctatctaagctgttattttatatattatagtgttatatattaatacaaatgaacatataataagtatattgattaatatcccccattgaatatttattataatatataaaagatatatatttacatagagttgaatattataaataggaattaggggataaactaccaggtaagctaacaacttttaagtctgaaacaagttgattcgataatatatatataataattaaagagaagacgtgcagagaatattattcaatcctaacacagttgtattttagctagttagggtttgatttagttattactattccatatagagaatacttctaatgctagaatttcatgaagaaactaaataatagagaaaaatgaactatcttttacacaccatcatctcactatttatacctcatataaagtgacttgtccgttctacttaatgattaagaaaatgtataatataattgaccttgttattattttaatagaccctttatatggatttctatgattcattagcataaagtatatattatccttaaattattattaaatacaatatgtgtttataataattttaataaaaatataaatattcttgatatgtttaatacttgtaaagatataaattattatatacaataagtaagttgaaatgcttgtccaaagaaagatcgctaatgttaggtatgagtaaatatgattgttagatcacgttgaaactcaactactgttaataagcttaggtactagaactgtcacaacatatacaattttccatatcatttcgttacgactaacagatggagagtacttaatgatgtaatttgtgatggtattatcagttagtgaacaagaagatacaaaattaaacctgaagaaataataaatatatgttaaaattctagtaatttgtatagtttattaagttttatggtataagtattttatatatgtataaaaatagtttagtattatttatattgtatagcacagcattgcttaatatcaaaatatgatacttgatcagacataaaatagattgctattatagggatatactctgtagaagtataataatttattatatgtacaatgaaagcatatagagatgtagttaataaacacctatatgatattagtatggaagaatcaacacgtgatagtatagcatttgttttttaatagataaatttaagattggaatatttaatattatattgatattcatactatgcaagaatcggtttaaaataagtattaaaaactttcaatattatatgaagatataataaaagctaataaaaacaaatattatagaaatagatgataataatatgtgagaattagtataataattattactgaatattgtagggatgcaatgggattgtattgaataagaaaaactatagtgttttacaaagtagttaacataactcaggcagcatttttaatagaagaacaatgatcttctattacgtcattcgtattcacatatctatgatagactacttggaaatataaaccttgttgtggtttcacttcaaagtatgttggaagagctgttgggaaatggcgttaatagtagatagaaactgaacttttacgaaatgtatacagtggaacaaaacagtaaagatgaagattgggaaatatcatggtgtatgtgtcttgcacacaccgataattgggttcattggatccaatgtgatacagattattaatttccactcttcttttttgattcctattcaccgttattacttttctatcaggttgcagttgttgtatcgtaaactactatctatatgagtttgaattaactatatttgtatatgatagattacaccactttagaagtttcaagtgttcagtgatatgataccaaacgctaccaattgtgataaccttatgattattaacttctgataatagtagacttggaattaatattaatagataacttggatagataaaagatgtagactcactctatatctccagacctaataataaaaatgtaactttaccaatataaccaatattgactaagtaatacatattacataatgggatccatgatctaacttaacactttttttggatctcatatttaattaccaacaattattaatagttaatagctacctggactcttactatatgcattatctatgagacataatagaagttattgttgagaattaacacctttatgtattgaataaaccagatatattctcaactgtattctatgactattatgtagccgcttgtacacaaaattatagcaatgttctttactttttatgcagaacatgcttttaataatatacaaaaagtgtaaataaaattaaggtatgatacgaggaaatctttagttttatttatatggatatcaagtgattttcctccacgaacagtaaaatatgtataaatagtttcgttgtttgttatctgttataatctcattttttctatgtatttcattctggaatattttatttcaagagaataagaaaatttatctaagatgttattgacactagcagtcatatgttaattcatggtctctgtatcaaaacctttttaaaaattattataatattaacatgttgaactgatataaacttataatagaatattggtagtatgatgagttctcagtttacttataatagggttggtggtgctgtgaatttatctcacgttgcttagttttttattctacataactaaaatacatgatattgtgtcactcatttaatatgataaattcagattactaaagagatcttcaattatatttcaataagccataaacacagcaataccctataacaccacgacaatatctcactagtcagatttatttctatacattatattctcttctctctatcatacatttaatattttgaagtgctatgtgcattaatacatctacttctactgatatcctagtaatagctcttattaaattacactacccactacaactatcactttgcacaatactatcttttattgtgtattatgccataccatagcaaacaatatagaatagccacttattcattcttacacgacttttttgatctatacctactagttggttaaaacagcactgtttgtagaactgtaactgccaacatatgctaaaattgtcttcttatcttttcattctttttcttttctgaaatccaatttttcctaaattccaaaaacttttttcaatcaaataaaaacaactcaaacagatatcaatcactacaccatgcaaacactgatgtaaacaatacaaaggagacctgcttacagacaagaacacatcctcagttgagatctatgcacttcacaaattcacattatataacattgagatactaccattcaacatgatataattatgccataaatatatttgatacagccaaccaagatatccttaactatagagagtatattcacgacaatccactttgtacatgggttattactaaggaagatatttataaacaaaatacatctatctttatggtatggttactctattgctatgagtatttacaaatacataaacacaaacacttacagtatcttccacctaaatgatataatctgatagcacatatcaatttcacatagtgatcacttcaatactactaccatgaaacctatccatatagatgaacctcacagtataattatcaacactatgccaactaccatcgtactactacccaactacatcacaaatattacatccaaatcactcacaaaaatacaccctaccaataaccaagattaaatttcttcatgaaaatttattcattattactgactgtcaagtggtaaaattccataacactgttgtcagttcttacaacaccaacataatatccaacaatcaacagtattaaatcaaataatacacatggatgaacttgtgaatatattgtaattaaaaacaaaaatggtttaagtgtgggatacacaacagaaagtaggttttttgctgatctgtaggaattattttatctgagttaccatatttatatacaattgagaaaagtggaatagtatttgttttgagtattactatcaaatgataagttgatttttcctactttatacagtgttatctaacttattcaaacaaagaacgttagtttagcttgagtaatcaattttcaggacactataagatatttaatacaatgaaacaggaagtttttttctatgaaacatcagctttcagcaaatgtctatcttttgtggataacgattaatgtcatatagtgtattaatgctataagctattttttattgctatgagttatatgtgggttaggtgtaaaatttcttattgtgcctttatatgatatcactctctaacttttgaacatatactgaatgatatccagtacagttacgtgaattatcctccagtcatttttggtttagttctctaatgaattgtacaacatcaatactttcctaattcaaatgtttttagttgcagctgctatttagtcaactagtgataatacaaaaccatctgctgttagaatattgcaatttacaatgatgatgtcattagataaagaaaaataaatttggagacatattaaatttttatgaaggtttataccaataccagtagatgccattcctgttggaaattaaacaactgttaccacatgatttattaacaatcaagttattttatttgtacatttgcatgtattgaaatgattaaaagttgaaatgttctttgatcaattaaaatttattgagattgaaaaagataaagaatgagaaagagttaggggtatagtatatagagacctgtttgagttggtatattacataagccagaaatgtttaacttgttagatagtaagatgttatttaggatagttgcaatgatcattattgatacgttacttaatgattaaacaaacatattaatatataaatttctattaagagtataaaagcattctaaataatgatagctttcttggttgagatatgaataattaataatattgataacaccgaaaatatcttcagtaagtaatggtagtgggtttaattattgttcatatagattatcatctttgtctatctcactgtcatagtgttgtattagtattgggataatcaaagagattattttaatacaatgaactgtagtatcacaaatagttctgttaaattaatacaaataatagtctactaatgggatgttcataatacagattatatttataaatacattattggaagagttgttagatcatttataacagattagatagtttgaaacacgttagttatgttcttgttctaatacttatattcatattggtaatattacagttaagatccaagatagcacacagtttagagtaaatagcaaattagcctcaacataataattaatgagttattataaatattcagagtttatttatattatttattatacaaaatgtttaaggttgtaattcatttcgagatttatgttgctatgtctaacaaagagtaacaaagttatcagatgattgggatatgagtagagtaaataatgtccattaacattgctacaataaaaattaatacatccatgtaagttataaaaatttatattaaagaagattcgaagataaaaggagtatactgtataatattgtatcttgtatattagttatgtagaaagaaaaaaccaagcaatacaataacaatttatagtaccactaatttcttactataaatatcaataaaacttataataccaccaatattctattgtaagttacattttcctattattttagtctaaaatgaactctactagaatttttgattccgaagccttacgtcaacatctatgaagcaatattaatatatagttggcggctgctttgtacaatttttataagaatctatcatctcttaatatttatatgtcgttctatatttgattttttcttttccgtccttcttttttcgtttgttttttgcatatataatatttaagtatagttattaatttcattcttatacaaactttttgaaaatctttaaaaaagtccagacaaaaatttgtaaggattcttataaataatatacaaaaatatagatattaattatatctataaacgtttacaaatcacataatggtcaattctaaactaataaactcattatttttggctgatcttgaatacctgaactgatcttaagttattttattttctgggcaaaccttagaagatagaataccaaccttaaaactaataattacctctggcacattctctcaacaatcagagatttcttaaatgaaattttcagtaatctgccaccaacgttaatttgacgatcatttgttcaaatacacttacgacttggcttcaaagttttggctaccccaagtctttccccttaatatagggtgttacctgtagactacgcatttcagtattccaaatagagcttcttacgaaatttaatacaactaaccattgtgaagaactcaaattaagaaatcaaaaattaagatagtgaaaaattctagcattagcatctgcacttaagacgctactaaaaatcatagtcatgattaattagtataacccttcatatataaattacgagtatatttttttatcttcttatataatggagaaaactaagagtatcatgaacaatatttataagaaataattatttacaacctataaaaagaatttgtgaaattattacttcgtcttcttatcttgatcctaatataacattccatcttcgagacaaacaatctttctcatctatatatatatatatatttttactagcctatattataacaataccaacagtttgttttttagtaatacctatcacattatcttgaatcatcttctaaaatactagttaagatttactcaataatttttctaccctaaaaattgaagagtataacgaccatcatacactcaccaggttaaaattggtaaaaaaaaaactcaaaaaaacgacaataagaatagaatgcacgaaacagttaatacatttcttaaaaaaagtacggtattctttgtaaatattgttcattttgcttttcttcaatagttagacttaagattaagacaacttttcataatacacgatttaaatctttaattcagactggtgcttataattttagtaatgttagactagatttgcttctatgtcaaaaaatcgattaaaatatgacaccacctacaccatcacacttgttgacggtgacagttcttcgtcttcagaagttgttgatattgtcaccccaccttcatccaccttatacactactgcctataaccatctaaggggtaaaaatactacagcctaacaaaaatattatattttcttttgtttttctatacaactgtccaataaaaataaaacaaaatccacttgtttatattagttttaaccaatatatagttcagagtactcttcttttaaaatcattttaaagatacactcaaaagaatacttcacatagcatactataaacatctattacctacaaattcttatattttaaaacacattattttttaatcataatacttctcatttctattttatactttccataaaatgtactggaaaccctctataaaagtgtctatcctacacactgaagtatcgaaagactggatgagttttttctgtaatgttaactctaccatctagccttaaacaggattgttacacgctacaacaaggaggaagacttacgtacctagtctatcttcctccattaggactccttttaacagttcttcttttttcaaatatttgcaactttgaataacaatgcgatctcgaggaaattctatccactgaattcggaaaaacaaaacaaaatctaagctttttttaatggacatttccctttttgggataaagccgtagtgtttttgtcataataatttttactctattgtcaacggctttcgagctaaatctcacgaaaaatatctgcagtcagagaaaaaaaatttttcgacttgtaaaagaaagcaaaatctttaatgggacatgtaaaatccttaaattacacaactactggaatcctgttgtaggtagccatttttcttttgaagagacagagattagtcctttcaatcttgaatttcacatgggttagataataaaacaccaaataaacataaataaatatctcagaaaacttcccaattaattacttttgttaagacccctgctagccaaatctgttttaatgatagagtgttttcaattattatatttttgaaacagacatccaacaattactacaaatcactttgttttccaaggatacctgtcttcgattttctttcatatagatcaaaacaggttatgtgggactgttgtaataatagtagtcatgcttctgcttttcaataaatcattctaaaatcttctggatttgtcaaaatccttagaaaacacaatcattatgaataatataaagaaactcaatcaaacatacaacaaatatgtcgaatataccttttttatagcaatgctaattatgaaataacaaaacaatttatcataacaataatatttctgaagaatacatctgtgtaaatatagacgattttattttttttagattttcaaatgttatcattaattatattaatatgatattgtctttaaatagtcagtgatacacttaggcattatatgcaataaaaaacacaagaaaacttttttcaagataaattttatactaatggggcgatattatcaataaagtagcagagatttctaatattacacatgaataatcattcaaatacagaataaacacaagttacagcgagtagtcttcactgctaaattaacacttggacaaaagagtggttttaacaataaatttgaaagataaaatctcttttgagccatatattgaagatgatagcttactaaattttacaattgtaacataaaactacaaatattttatggtaatttggatactacaatatgaaaatttgttattaaaaataagcaattaaacgaaaggaacaacatttttagtttgaattttgaaaattaccaaatttaaggaatattgatgtcctatatctctgttaagtgtaaattaaccttagtatacttggcaattaaaacttgaaaaggactctaataaataaatatccttagtcgctagtaattattaaaacatctctattatacgtaaaagcaccaaattcaattcaagatatagctaacttacatttatctgagtattattcagttttgtgatttgttataaatctattaaatctttttagtattcctaaaataacaatagcaatatacacttgaattgttttaattttctttttgcctctaaaagaataaatatactcaccgatattaacgtcgttactatgtctctccaagatactgtaccgtaattaatttttgcttttcactatgtttctaaaacaatacttctaatacctcctcaaatttataaagcatgaaaattttgatggtttcgtagttatgtaaacattttcttattatcattaaaattggagcttttgctcttcaatgaattaaaatatgttcttaggacaatatgctttataacataatataaaagatgtttacttatatctgttagaagtgttttttgtttttttaaagatctctagatatctgatattcaactgtaataatataaaagaatctcataaatgactgtatcaattttccctattaattgaatactaattagaaatatgcttgggataaatcaatttgaacttacaatttcatttctatgaacttcattttttttatataatacaggatacgacaatctcttgttatactaaattcttatgggtcaaaagattttgtatatatcataatgagtatgttttgggcattatttctgttaactataataaatattatacaataatgaatcaactacttcttgtaggttgcggattgcatacatttcagactagaagaaatgattcacttcctaatactacataaaaacattgacgcaataacatcaacatctaatacgattaaaaaaatgaatgtccaaatttttctgatcaaaaacaacagaaaaaaaactgtttttcttgcgctgaagtaatgcaaaaatgcatttctttcgaagtgaaaataaaacatttaacataaacaactttatctactatggatcgtcttaaaaaactttagcttacgtattgactggctattcttctcaacaacaccatattagttttcaaagaaattacaaacttggtatccaccagaattttccaatccatttgaaacaaaaacgataaataccatgaattattgaaacaataattatagcatattcccctttgatgtcaaatcacaattaaaattcataattaaaacgtttatagtatcataattgtctctgcttatttggaaacatctattagcccattttacgatgaaagcaagtagaaaatttcatgtgagtgagatatttctattttactattatgtgatcatttaaaggaaaatttctcaatgtttgttccaaacaacaacaggcaagatgtcatgcacaaaagtagtgtaaaacaacatatttgtgccagttgcataaatgtcaaaaaggaaattgcaagatttgaaaacaaaactactatttacaatgaaattatgcaatcttaaattcgactacgttattatagttaaaaatgccaaataagtgaatgcaaataatttctaggctttagcatctattgcaactgaaatattttgataaatgataaagattggcagtgttgtattgatgctaactttagcaagttaaacttaaatcaggttccatagagacaataacttatgtggagttatattttaacacatatgatagaattgatgattagcacagtagtattgaagatagttggtttatcttagacaataatgaattttatatctaacatttctattacttgagccttagacaaattggatctccattttattaaaaactatgcagaaaatatatatggtgtttataaacaaacacacattgatccttcactatttctttttcttgaaatattttcttcaaaaagttgttttaatgatctacaaaaatcacttttaaataaaaaagtagtgattatctgcctattattcaacagttttgataagtatactaataattaaataaaaagaaaataaggcaaaagctagtggatattattttacaaataaaataacagagagacttttcttacctatggttataatattatatatatctagaatatttattgctatatcataataaatagaattctaaaatttattagttcaccattaaataaatatgaaatccaacctttattaatgcgtttaaataatttatatattacaacatctaaaatttttcacataatactattaatacttacaaatgaataatatttaatgacatagtttttggaaaagataatacaaagtgaaatattaaaaactaatgggtgtatattatatttctattattttgtatattttattaagtcttaggatataattagatataaacatttcaagtatatataatgacagtttgatattatttatttcacacaatacatcataactaaaagttggattcttataatatgtagttagatttacaataagctgttaataatcagtggtgtgtatttgttacttgctatattggcaatcttacttaaaatatacactaccattagattaataattaattatactcccaggaagtacattcctataatatttagtaactttggtggtttcctcattagaaatgtcttcaccaagacgctggatagattatcaccaagtggaataatttttggtttatttttttgaacgttattgaggtctacctgctcaggtagttccacaaggtcgacagtctctgggacttttgatattccttttactctgctcccattcagcttagttctcttaaatatatggttcccattcagtatttgattcaaagatacagatcttttcattttcacatctattggagtagtttgattgttttatattgtctctttagagtatcaaatatgatcattgatatatttcagcaggatcttcagatatttggtctctacgatagcattgaaggattccatatagatagtgacgtattcttcacaactgaaatgaaaaaaatatcgtccttgagacgcataaagttgtatttaagaaggtcaataacttatacaacccctgtagtcatgctttttaggtaaagaaaggaaagcatcatgatcatgagaatgaagtaaactactaaggtcatgctcgtagtagtaggacaagattcaatatttttaagtaaaaataaattagatcaactaaaagtattctgtaaataaattatatttaaaaaaaatattttatacaaaaagtaaataaataaaatcaaggttagtataaaaaagagaggcatttgaacttgttgacgcaaggcttcagaatcaaaaattctagtcgagttcattttaaactaatataataagataatgtaacttacaataggatattggtggtattataagttctattattatttatagtaggaagttagtggtactataaattgttattttattgcttagtccttttctttctatataagtaatatacaagatacaatattatacagtatactcattttatctttgaatcttctttactataaattttcataacttttaatcacttagtacgatgaatttagattatcaaacatagctctaataattatatttcaacacacccccgtaagctaaattcctgttctattttcttcatgaataaatctcggacttttataaaggcaggtcttggtaaaacttttgtcattatatcagcaatttgttcagttgtatttatgtgaccaatttcaataataccagactctacttggtgtctgatgaaatgatagtgaaggttaacatgtttcatttttgagtgtaagacagggtttttagctacgtgaatggcaggttcattgtctatccataatttaacttcgtttacatctattttcatgtgattcaacatattttttatccaaattaattccctgcttgtgttgctagcagaaatgtattctgcatcagtagatgatagacaaactgcgcttgtaattttcttggaagaccatgtaaccactccaccagcaagttttataataaacccaccagttgcatgtttcaaatcattcttatttccatgagatgcatctgagaatccttcaagatatttattggatcttgtattataagacaatcctagttttttggttttatataaatattgcataactctgtaagcaccttttaaatgcacctctctaggatctttgaggaaccgtgatagtagttgaacagagtgagctacatcaggccgtccaacgttgctaacaaatagcaactggcctacaatactttggtattcagtgatattggcaattgctggagattctgtgtcaaagtaattggctgtgttagataatggaaattccacatttttatttaagtctatttgacagctctgagcagctttggtaatatagtcctccattgagatggttatattgttcaggttatcttggtaaacattcattcccaaaaatttagaaacagggccaagatctttcatggaataagcttcgtttaaccctgctttcacagagttcataatatctttatttggagcagcaattaaaaggtcatcaacgtaaagtgcaatcaatactttaaagttgtctacatttttaaaataaataccatattctccatcatgacgagtaaatcctctcctagataatgttttatgaatatgcgtgttccatagtagtggggcttgctttaatccgtacatacccccgtaaagctgccacacgtgattgggatgcacaggatcaacaaaacctggaggttgacgaacgtaaaccggctcttccattttggaatttaagaaggcagtgtctacatccatttggtgaacacggagattaaggagagcagagatagcaagaaagatacggacagaatcataccgcaccacaggagcaaaggtttcttgatagtcgatgccagctttttgagtgtgtccttgagccactaaacgagctttaaaccgatttccgtccttaatgttaaacacccaacgagaccccaaggcacgacgaccaggagggagaggagtcaacctatatgtatcatgatctttaaaagcttgaagttctttcagacaggcttgataccatttatctttatctgatgaactcattgcctggttgaatgtatttgggacagaagtagtggtagacgtaaaggacatgccatgtaccaacgcagtcaaggctatgtgatgtgaagagttatcatcagagccagatgattgagaagaagggaataccggtgttctaatgagttgggtgagaccatccatggagttcataggaacaaaactgccggagtcaatattaacagcctcaacagcaggggtaccaattttaccaggactaattggattagaatcccactttggatggtgtttctcaatttgatgatttaagtagaattcagaagcaggaataggacctaacttgttatgattaacaattgaggatgtttggccattcaacttgctaacatgtgtggtgataggggcggaaatattgtcagctaattcaattttactattttttaatggtttatggggatctaagtcttctaagttataaaccggtgaattatcagttgataaggatttggattgtagattaggagaagatgtgtcggagtgggtatcatcaatggtagatgttaattgttgagtagttactggaacagctgttggagtagttgaagagtcagtatcagaggatgaagcaattgatgatagttcttctgcttccttcttgtttatttgattagaattatgtgaggagaatgaggcggttgactcattgtttatagaggatgaatcaaggttgttgaaagtaaaattttcacagtcagaagtcgtagaaataggagaagaagagaaggaagtagatggtagttcatattcatcagaggaagaggagtcatattcgtgcttatcattgtcagatgaatcaactcggaacataaaagaatcagaatcaacagatgatagatacggagtggagtatcgactagtaccttgatctagaacctcatcaccatgtatggtggttaattcattttctaagttgttttcatatataggataatcagtagtttcaggataataatttgacgtttgtatttcagaagatgaagttttgaaaatatcagtagatgaaggataaactgggacaccacctaaagtaccagtggcaaatgtatgagccacttcaacttctttggtacctgcaagtgggaaatcaagttcatcaaagcgaacttggtttgatacaaaaattttcttagaaggaggatgatagagacggtatgctttgtgtttggagtcatatccaacaaacacacattttacactagtaggagcaaatttcccgtcacgtaattgatgaggtaatgtagcatatgcagcacatccaaatatacgtagatgtgataaatctagattttctgtttgaatattgttccagagacagtaagggatagaataatttttattagatactggtaacctatttaagagatatacagcagtacttacagcctctgtccacatagaaggaggtaccttgcctccgattaaaaggcatcttgttttttcttcaatcgagcgatgagatctctcaactgctccattttgaaaactattgtatggaacagttaattgatgggaaattccattgcttttacagaaattatgaaatttactagacataaattcacgtccattatctgtgcgaatggcacccaccttaaatccccctcttgacttgaaatgattctcagtttctaagatccattcaatcagcttatcacatgcagctgatttcgatgctaaatgaattacggaataatatcttgagtaggcatcccggatagtcaaaaaatatttactatcagaaaaattagtatacctaaattgaccacaaatgtcaacttgtagcagctgtaaagggctcgtatattgtgtgtcagaaatttttccttttttcataaccccttttgaaagggaacaagtgggacacaacgagtgtttatcagcttccataatgggcaagtcaattcgatttgccaatcgattataattagctaaacctggatgtcctactctagcatgccatttaatggcatctggaatatttgcctttggagatggcaaaacagaatggtcatacgaaataaaagcataatcaagtggtttgttcatcgtttttgtttctttattgttgggcataaaaacataaagttgatttctcatttcaccaacttgagtaattttattatttttaattgtatatacctttgttttgtcaaatataaatttcatgtttgatttagaagaagccattttgacagaaatcaagtttacgttgccatcaggaacatatgccacattgtataatgtgacatgtcctagttgtactgtaccaatacctttaatagcagttttacctccaatgccttcgataaccccaaactcattctcatctccttcaactaactcgcaaaacattgaacggtcgtgagatatgtgctgggtacaaccagtatcaaaataccaatcgtttctcgatgttgtattttgtttgctaatcaacgcaatccaagccgtatgagaattattaatcttgtaatctttttcatgatttttatttcttttgttctttaaccattcttgaaattctggacactcattagttttatgttgtcccccgcatcttttacaattgaagtttttaactttttgcttgaattgatttcttcttccaacaaaactggagttagttactcctcttttagcattactaattacatcatacacttctctcaatttaatttcctgattcttaccgaatatatccataaatctttggtaagactcatcatataaactcattaaaaataatgaagcagctctttcacgagctttaatcttgatgactcttaaagcctcttgttgcgcagaagttaatgaatttaaaaaattttcttcactagatgtggtttcaaaaatgacctccactaaacgattaacaagatcatactggtcgtctaatgttaaattcctagctttagctaactgaaagaaaggttctgcagctacatcaatagattctgtaccaaaacactcagttaagtgatttagaagaccttttccagttgggataccgtaatcaccagcaacatatctatctgcttcttttttagcagatccttcgacattattaacaattaataattttaatgccgtttcaaataattttttaatataagcaatcatatcattagatggattatattgttcaataataacatttagctttccattttgtgcatattgataccagtgtaaattgatatcagacatatgcatagctaagatgtttatccattttttaaagttctttttcccgtccaatttaattggaatacaacctgcagctgtagctacagggctcataacctgttgacgcaaggcttcagaatcaaaaattctagtcgagttcattttaaactaatataataagataatgtaacttacaataggatattggtggtattataagttctattattatttatagtaggaagttagtggtactataaattgttattttattgcttagtccttttctttctatataagtaatatacaagatacaatattatacagtatactcattttatctttgaatcttctttactataaattttcataacttttaatcacttagtacgatgaatttagattatcaaacatagctctaataattatatttcaacagaacttgtactaataatcaacaggtgctgtaattttttatactaacatcagacaatcaccataagtgatatattacagcgtctgtcaattattagtacaagttcaaatgcctctctaaaacagtatcataattagatcaaatgaataagagccattaaaatagcgctgaatagaacatctgaggtcaaactagctgccaaaccttcatattttgcaactgtaacactttccgcagaattagaagaagaagtagcaacacctacagatggaacaacattggaatgggcagattctatgcttacgtctgaaggtgcagtagcagtagcagcagaagctgtaacagaacctgtgttagcactttctggacatgaaggagtgtatgtagtgataacaacatcatctgtagtataaactgtactaactctcaacactggttcactatgtaggacagtttgactgttttgggaagaaaatgaagtggtagcggtggatagtgagcaaactggacattcagtgacatctaccatgtgtgtgctcttaacagtagcggttgtgacggagtgagcaacatttgttttagcggatgcagcttcaccagtagcatgtgcattaccattgacactaatagcagaaccattactgttgcttggggtagatgttgttgcagtagtagctgatctgtcagtggcatccatagcagaactatgactgattgaggtagatttggtagaagtagtagctgatctgttagtagcatcgatagtagaaccatgactgttactcgaggtagatttgttagaagtggaggttgacttgccagtagtatttatagaagaaccattactgttgcttgaagtagagatcttagaagtggcagttgatctgtcagtagcatcaatagcagaaccattactgttgcttggggtagatgttgttgcagtagtagctgatctgtcagtggcatccatagtagaaccacgactgattgaggtagatttgtcagaagtagcagtggatctgtcagtagtattcatagtagaactatgactgattgaggtagaagtgatggttgatctgtcagtaacatccatagcagaactatgactgattgaggtagatttgttagaagtggtggttgatctgtcagtagcatcaatagtagaaccataactgattgaggtagatttcttagaagtagtggttgatctgttagtagcatcaatagcagaattatgactgattgagacagatttcttagaagtagtggtagatctattagtagcattgatattagaaccattacttttgcttgaagtagatttgttagaagtggaggttgatctgtcagtagcatcaatggcagaattatgactgttgcttgaggtagattttttagaagtgatggttgacctgtcagtagtattcatagtagaactatgactgattgaggtagatttcttagaagtagtggttgatctgttagtagcatcaatagcagaaccataactgattgagacagatttcttagaagtagtggtagatctattagtagcattgatattagaaccattacttttgcttgaagtagatttgttagaagtggaggttgatctgtcagtagcatcaatggcagaattatgactgttgcttgaggtagattttttagaagtgatggttgatctgtcagtagtattcatagtagaactatgactgattgaggtagaagtgatggttgatctgtcagtaacatccatagcagaaccattactgttacttaaagtagatttcttggaagtgatggttgatctgtcagtagtattcatagtagaactatgactgattgaggtagaagtgatggttgatctgtcagtaacatccatagcagaaccattactgttacttaaagtagatttcttggaagtgatggttgatctgtcagtggtattcatagcagaactatgactgattgaggtagatttgttagaagtggtggttgatctgtcagtagtattcatagtagaactatgactgtttgaggtagattttttagaagtgacagttgatttgtcagtagcattgatactagaactacgactgttgcttgaggtagatgttgttgcagtggcaattgacttgtcagtagcatccatagtagaactatgactgtttgaggcagatttcttagaagtggcagttgacttgttggtggcattgataccagaaccatgactgttgcttgaggtagatttcttagaagtggtgattgatctgtcagtagtattcatagtagaaccattactcttgctcaaggtagatttattagaggtgatggttgatctgctagtagcatcaacagcagaaccattactgttgcttggggtagttgttgttgcagtgatggttaatctgttaatagcatccatagtagaactacgattgttgcttgaagtagatttcttagaagtgatggttgatctgtgagtagcatccatagtagaaccattactgtttgaagtagatattgttgcagtggtagttgatctgtcagtagtatttataatagaactatgactgttgcttgaagtagatattgttgcagtgatggttgatctgtgagtagcatccatagtagaactatgactgtttgaggtagatttgttagaagtggtggtcgatctgtcagtagcatcaatagcagaatcatgactgattgaggtagattttttagaagtagtggttgatctgttagtagtattcatagcagaagcatgaatgttgctcgagttagatttgttagaagtggtggtagatttattagtagcatcaatagcagaaccacgactgattggagtagatgttgttgcagtggtggttgatctgtcagtagcatcaacgacagaactatgattgttgcttgaggtagatttgttagaggtgatggttgacttaccagtagcatccatagcagaattatgactgttgcttgaggtagattttttagaagtgacagttgatctgtcagtagtattcataatagaaccatgactattgctagaggtagacttctcagaaatggttgatttgtcagtagcatccatagcagaactatgactgattgaagtagattttttagaagtgacaattgatttgtcagtagcattgatactagaactacgactgttgcttgaggtagatgttgttgcagtggcaattgacttgtcagtagcatccatagcagaactatgactgattgaagtagattttttagaaatgatagttgatctgtgagtagcatcaatagcagaaccatgagtgttggttgaagtagttgttgttgcagtggaggttgatctgttagtagtattcacagcagaagcatgactgttgctcgaggtagatgttgttgcagtggtagttggactgtcagtggcacttaaataagtaaactgggccgttgatggaaagaagtctgaccaatctccaaaaggtattgtgtaaacagggttaggatttgatgtcggagttatagtaatttgagctacagcatgtgttttttcatatagagatatagatgtccaatttacgggggcggctgtccagtgaggtgttgggaactgaagagttgcataagctggtttcagaggcatgacattttcatggtatttaccataatcattaccaagaggtatgaactcacactcaaaaaaatatcgaccaggcaaaccatcaacaccgggccaatattcttgcgcaccacaaccaacctccgtggtggatttccaaacaagctgtgtaaaatgtccattatgtaagtaaggcaaaaggtaaggatcgctgtaattataatcattaatttcatcaaaccaggcgtctacaccgctggtcagaggaccaggtcccacgtaaaagtttgaaccaataaagtagccgtaatcgggagcgtcttgaaaaacaggcgtcttgacattaaattcgcaagcccaccacgcagcccgttgggctaaagtatcagaccaggttaaattaggagtgtcgacaaacatagatctgtacttattcattaggtccaaaacagccgccttttgttctggagtcaacatacaacgagcatccttagatgcattatacggattattcacaggccatccgtccactgtggcaataggacccttaccaccgtgagtagtcggtccaagataactagtaatataagatacttgcggttgcgaataactaggaattgtttcagtataaatagaaatgtaataagatgtttgtgccttcgatacagcagaaaaagcagctaaaagcagtgccgcgcacaatgataaggcacttgagaccattatattattttcaaatattcggaattattgacttttcagtaaaatatatagtttggtgagtatactttatggcgttagttttttggttatttgaggtgattcacttagttcggttatactggtagcatctgggagtataacgagatgatgctcatgcctgcaagaagagaagcaagaaacgaaagaatattcagacataatccatagtagttttatataaaaatgtgctcatgacttgcaataaaaatgattgtctaataggttctaaatttttgactgaaccagaataaaatataaataaagttttgcaataaatcttcaatgataaaagtgtgtaaaggagtagaaacaaagaatgaagaaaaagatctgtaatcttcaacaattggactaaaaatctaagtaaagcacaaaaacacagcatagctgatcattttattatctctaataggaaaaatatcactgtgtggtagtttctttaaacaaaaaaggaaacagaaaatgttgagttctcgaaaacatttccaaatggagaattaaaaatattgtttattgtttgggcattttcacattgcagaacaatagaatcagttttgtctagatactttacttttgaagaacataaaagggaaagtttacaaatttaagaatggacaaatagtttttttcctttttgctattgtgttggaaacactcgtctttgtatttgatgcaacgacaaaaagaataaaagtgaagaaaaaaattacacaagtgggaaaagagataatacagacaattctaaccacactatagatatacatgtctctttgtattctatttttaaatttttgcccctgaattattttagagaatccccactcttacaggatcatcgcccctgattaattagttatttggcatttatatctcttttttgtatatatcacaatattctatagtaaatcgatctatagaatgtacaaaatttattacttcattcacaatagaatattaaaatttttggcagtgaccgtgggatcgaataggaatgtataatttaaaaaaggggtaaagaatttttattgcattgttactgtttatacataagttatataaagttatatactataagaaccatcaacaattttttttctttttttagttcgtattgcaagaatcagcaccttatatgacgttagcatgtagtaatattttttataatattcaacaaatgtagtaaaattgttcttttgttaaccaagaatttattatttaaagttattattgttctattagaacatctattatgataaagatctaaaatataattattctcctggcagattttggtctcaattagactttttactgtgatattcctattcctgattttttctcttttttccgatctagtataagaacaatataatttgtaaaattcaaaattctccatttaagtggagtgttttttctccttttcggatacacaatatgtaagacatgcaagagtactattgaactagaaaaaatgacgtataccttgtggaatccttaaaatcttttacaatgtcgtttaatgatagctatttggtttaattttaagacaaacaagaaaaaaagatgattattattatattcgacctattgttatgatgttgtttatttatactaggtcaaaggatgataggaagtttgtatcttttcaaaatagcaagacttgataacagagcatttctttttgttttttgtttgccaattggtggttgaatgaaatgactataatagatagtatacaatgaactatttttaagcatgttttttatttttagattatgggatttattgttgtccaaagcatcttcttgtagtagtatttaggaatatttctgttagtaactgaaatgaggtatttttattcctaagtttcgtaatatgtctaaaaatgacaatttaaaaacaaccctaaagttctatggcttttgtaaagaattgacttacaatttaaaaaataaaacctaacacaagtccttgggacaaaaaataacaacaatcactctaggacggttgctaactaaaaaaagaaataaactttgttggtcattttgctcgtggaattaaacaaagtacattccaacaaataaatgctatagattagataaatactgaagaataaccttcttaaagaagatagtaacttgttttttctacttacttactatattcatattaaaacaggaaaatataattaattcatcttgatatgggttcaagcagaaaattagtttctttgtcgagttgcaaaactatgttcaaaccctcgtttgctagaagaagagttgaacaaccaaacttgttgtggttttttaccctaaaaaagttaaacaatcagataaaaatttgtccaaatgtagacaaaatttaaccggttagaaattggaattaagtatttttacttttgccaaaaattttctttgcttttgttactacagaataattgaaaagtgaaatgaggtttctgtgataattggtctgaatatgcgtttacatgacaagagcatgtttttctgttttactggaacgtacaagcaaaaaaattttttatgaaaaaaaggaaaaatttgagttagctaaatataaacaataatagatgtgaaaaaattttcaaagacgttgtgtttgtctttttgtgtacattttttgcctgttataaagcaaaaaaaagcaaacccaccgttccatggtattttttctatcttgcttctaaaaagtcttacaatatctataacactatattgtaccagctatatcgtgtagacatgttagctacatgaagggaatattaacacaaatgtgtagttttaataatcaattttttctaatacttccaattttttttattttgatacagcaccaccaatttgaattcacattacaaatatagatggtacttctttggagatataaaaattcttcattctgtttttcagaaaattacaataatgccaagttgtgttttggttactgaaaattcgtcatgcagatagtgttgattagtaagagttgctattgtatcttcataatatttgaatagaaccgatatatgtattaaacaaggttgtgctaacatgaggtgtttttgaaattataggggtgggagttctttaaaataattcagggacaaaaatttaaaaatagaacacaaaaagacatatatacctatatcgtactaacatgataaaaatcgggcatgaaataatattctgggtttttctagctttcatctttatttagaggtagggtttgtagaaaacggttcggcaacttcatatctcaaaagtagcagatgttgtcaagataacttaataatggcctgtcttctttatctacttgctttttctgtaagcctaattaaattttttcattcttaaaataaaaagatagaacaatatttgtgcgcagtcacaagagaatagttaacagcagaattaacattgtttatctttatatattcaatacttcttatgtaattccaaccgagacgacgtacataagatttaacaatgttaatttgatttttggattcattgtaaaaaaaatgaacttcagatttcaaaaaatatatatacatcatgttctaaacgactatgttttgagttttatatcatgtgcaatttttcagctgttgtgttccttgcatggtatgaatcgctttacatacttaacaatcaagaaaaaaacagattagtttaagatactatttatggcgttagttttctttttttgcttagtttttctttatacttgatatatagaaataggattaagaacgaggaatgtaaaagacatatattaagagggttgtgatgttatattataagctttagtaaaaacaagacctaggaaaaataatgaattactaatcattgttgatactggtaagacagttacaactatgttgtgatagcttttaagtgatctctttattaatgtcaataacagaaggaccaaagattctattaaaataataatttaaagtttttaaaatcttcaaatatgtagtgaataacaaatataaagcattttttttttttgttgttgtttttctttgtatattttgaattgaaagatgaaggaattcttcttatggctaatattgtaagtttgtctattggaggatttccagagagtgatagttatatcggattttgttaagaggcctttgattattaagagatatgtcaggggtactcatcttatttaaatacatcttagtaagaatattagggggcaactttaatatcatacaaaaaaagaagaaggaataatacaacattagggtcattaattagtaatatatagaacttgagtaagagtgtttatacttatactaatcagtacaattcatccatttacatataacaactcttacagagtattggtgtgtgagaataggagagtagggatgagtatagatgttgtaaaaataggtaaatgagggaagagaagtagtagagtagatgaggagatgtatggaaatataggaaatatgatgagagagaatgtaaatatttatattatgatgggatatctccagggaaaagatagattggtacagggtgataagtagtgaggtaaggagggtatgtaggtgttagaacatagataagtgatctaagagggaaagtaagaaataagcagatgaaagattgggaagaaaaggataagacaaaatgatgtggaatggaatagaaagagaaataagaggtccccctataa

SEQ ID NO: 22 - DNA, 1135716 bp, Kazachstania heterogenica
  source 1..1135716: mol_type = genomic DNA
ccatacactatattatatcgacaccacactcccacactcccacttttagtatctgtcttcactatactttcctctatttatatcctctacaatcttaattcaaaacaaaaaccttttttgaaaaataaaaatatcaaccatcactttatatccatctataaacttatcaacttatctatattatatctatacctttttaataatccacacttccaatttactaataactcaactcatcactctattaaatacaaataccactactatccaacactctcattatctaactcttttactactcatctttttttactctctattcctctgttcgaatcttctcccatgccttttctcttttatttctttactacccatctctatcttctcgtcttccaccgttcgaatcctttctgatgccttttttctactactatatctctcccttttctaatttacactctttccctgttcgaaccctctctgctgctttttctcttttatttctttactacccatctctatcttctcctcttccaccgttcgaatcctctccgatgccttttttctactactatatttctcccatcatcacttctatctcccactcttttcccctgttcgaatcttctcccatgccttttttctactactatatttctcccatctctatcttttactcttccactgttcgaatcctcatcgccgctttttttctcttttatttctttactacccatctctatctcccactcttttcccctgttcgaaccctctccgatgccttttttctactactatatctctcccttttctaatttacactcttcccctgttcgaatccccatcgccgtttttttctcttttatctgtttactacccatctctatctctcactcttttcccctgttcgaatcctttctgatgccttttttctactactatatttctcccatcatcacttctatctcccactcttttcccctgttcgaatcctctcccatgccttttttctactactatatttctcccttctctatcttctactcttccaccgttcgaatcctcatcgccgctttttttctcttttatttctttaccactcatcaataccttctactcttccaccgttcgaatcctttctgatgccttttttctactactatatttctcccatcatcacttctatctcccactcttttcccctgttcgaaccctctccgatgcctttttctactactatatctctcccttttctaatttacactctttccctgttcgaatccccatcgccgtttttttctcttttatctgtttactacccatctctatctctcactcttttcccctgttcgaaccctctctgctgctttttttctactactatatttctcccatcatcacttctatctcccactcttttcccctgttcgaatcttctcccatgccttttttctactactatatttctcccttctctatcttttacttttccactgttcgaatccccatcgccgctttttttctcttttatttctttacaactcatcaataccttctactcttccaccgttcgaatcctttctgatgccttttttctactactatatttctcccatcatcacttctatctcccactcttttccaccgttcgaatcctctcagccgccttttctcttttatctgtttactatccatctctatcttctcctcttcccctgttcgaatcctttgtgatgccttttttctactactatatttctcccatcatcacttctatctcccactcttttccaccgttcgaatcctttctgatgcctttttctactactatatttctcccatcctcactttcattactattctcttttctcctgttcgaaccctctcagctgccttttctcttttatttctttaccactcatcaataccttctactcttccaccgttcgaatcctctctcatgccttttctctattactatgtctcttctatctatcctctacttcccttcccctcttccaagcctctctcatgccttttctctagtattatttctcttccactgttcgaaccctctctcatgtcttttttctattactatatttctcccactatctcactactcatcaacttcttctacttcttttcattactcccttctcttactctcctctattcctcttttctattctctttatcctaatatcttctgttctctatctctccaaaactaaaatatcactaacttatcttctactactcaccaccaccctctcctactctctctacttcttctctcatccatactctcccctccccttttatacattttataccaacattcccattttcaccaccactaatctctccctttccccacaacactataattatccaacccttaccatatctaaaatctccttattcttacaacatacacactcactctatgacctttctttatcaaacactcttttattatcttgttaataataatcaaaacacaattatatttttcaacaagacactcaaattctgttcatgtataaacatgttaacttatctgtattatttctatacctttctaataatccacacctccaatttacatctctctatttaacacaaacaccactactctccatcttctcatcatctccccataccccttactactctttcatctgtttatttcttactttccctcttatatcacttatctatattttaacacccagacaccctccttacctcaccacttattaccgtgtaccattctaccatttttcttcaaactacccatcataatatgaatataaacattctctgtcatcacattatctatatttctatttatccttccatttactctctattttcacccgaatctactctacttgtttacttccctatattttaacacccagacaccctccttaccttaccacttattaccgtgtaccattctactttttcctaagagatatcccatcataatataaatattaacattctctgtcatcacattatctatatatccatacatcactccctctctacacctattttcaccttaatctactccacttgtttacttcccttatactctaacacccatacaccctccttacctcaccacttattaccctgtaccattctaccctttttctccaaactacccatcataatataaatattgtcattctctatcatcacattttctatattttcatacatcactccctctctacaccaattttcaccctaatttactccacttgtttacttccctatattttaacacccagacaccctcctacctcaccacttattaccgtgtaccattctaccatttttcttcaaactatccatcataatataaatattcacattctctgtcatcatattttctatatttccatacatctccccatctactctaccttttcactctaatctactccacttgtttactactctctgttctaacacccatacaccctcctaacctcaccacttttcaccctgtaccaatctaccttttcccaagagatatccatcataatataaatattcacattctctgtcatcacattatctatatttctatttatccttccatctcctctatcttttcactctaatctactctacttgtttacttccctatattttaacacccagacaccctccttacctcaccacttttcaccctgtaccaatctaccttttcccaagagatatcccattataatataaatattatcattctctgtcatcacattatctatatttctatttatccttccatctcctctacctcttcactctaatctactccacttgtttactactctctgttctaacacccagacaccctccttacctcaccacttatcaccgtgtaccattctgctctttttgtccaaactacccatcataatatcaatattatcattctctgtcatcacattatctatatttccatacatcactccctctctacaccaattttcactctaatctactccacttgtttactcccctatgttctaacacccatacaccctccttacctcaccacttattcaccgtgtaccattctaccttttcctaagagatatcccattataatatgaatatttaccttctctctcaccatattacctatatttccatacattcccccatctcctctactacttctctgccctcatttacctcctcttacaatacctatactcacccctactcttctactctcacacatcttcttctctttcaatatattgtagtatttgcctttctctgccttttttatgtttgtttcccactcttgtaatctcacacatttcattctaacgttcttgtcacttttcttaatcttcactgttttcaagaaaattataaatttacttgttaggaagatttatacagaaaccctagaaaatatatttgggagataatctcatacaacagcatcaatgttcaatatcgtcgtagccctgcatctcatttaagaggaagctattcttttcttgtggctctttgggttttaccatatcttttattacgttcttttatatagagaagtaagctgataatatgcttttaaggggtataactgataaatacatatctttaatactttctaagagtatatactgtatcactacattttggcccctacacacctttcttcccccactatccgtttgttccatttcacatcagagacactcagctaatattactataccgtacactcccttattccccatcgatataccctcatattactataccattcacgcaccacctacaattagcttatgtttcattaccactatattattccctctaacattacatatcctaatactactactgtccctacacagagatcaccccaacacaccattcactcacccatctgaatatatagctacacctcccagatatcctaactactatccccatgtatattattatccatgcacacctattcttgctggctttttccaatttggaaatcatgtgctggtaaaatattaattatgctggaattgttccccaacaacaaatattttttgtcttgtaaaaaataatttaggattagattattcatatctggacttatagtatgtataattatcatacacagaagaagtattagtatactattattattgatttaacagacccactctatcacaatgtctaacccaccaccgatatgaataatctatccatttcttcaaatagtttttatatcttgccttattgcatgctgtaactgagctcaccagaaataaaataaaattgaaaacgcctgaaacatcaactgtccaatgttccagtaatgttttaagaaaattagaaccaaaataaatcattatatttcacaagggtgtaacatgacactagaagaaagagaagggtaaaatatgtgtaacaattgacaacagatgatcaatatttttaagactctcctggtgcatttcagatatatatacattaaaggtcacttggatcatgtggaatctttagaggcagtaaattgagaagtaatttgaagaatacgtttaagagtggtcttactgtgatcgatgagttattagaagatttacctcagatatggaatttttgtgtgaacaccagaccaatagaaggtgtcacgaattttgaagaggcaagacaaaatacatttgaaagttagaagtatggccttaaaaagtccatagaactggaataattcattggaacaatttacaaattctattggtctgcatgactttatttattctcctggtttatttgtgttcgaagacaaatcaattatgagagctgtgtatgttgctgatattttagatcaacatagactattctaaaaaacaagtttgctttaaaagaattgggttttatgaaacacgatatactagaaacgggtctctcaggtttagatttaaattataacagagaaaacggaaccatacagttgcatattacaagatatattgaaaaatgtttgaagaatataaagagattgtatctaaatagaaaaaaactaatagcgtacctaaccttcataagtatgctatatatcccaaaacacataaattggtcatggagaaatctacattaaaagaaaaaataaaatggcttcaagtattgattggaaaagtcaattatattagaacaagaggaagattagatatagaatttgctttaggcaagctgttacgtctagtattgttccctcatcctaaagtaattaaagcagtcaaaacattgttgaagtatgttaatgataccagatatataagaagcgacgaggagaataaattggacatcacagtggttgcagatgtatcattgggatctgagtttgacgtggtgttatcgtatggattggtaaaaatttttatgagggtttttccaaaaaatccactatagtttgtgggtcatcagcagaagctgaagtggatgctccaaccataggggaagatcaagctgttttattaaaatgtaaaacgaagggaatctttaaaatataaatacaaacattaatataataacagattctacgccagccattgattgactcaaacaggactactttaaaacacgaacaaaattcataggactcagactggaaaaatcaaaagaagaaacacaagataggtctattgatacatttaaaataaaaagggaaaataatatagcagacccttttactaaagagactacgtggggaaacttctctagaataattaacgttttaaagggtgatatcaagccagaggatgtgttttgtatgactgaataaggaaagtagcattactttgagtaaaactgggctcagtcatgaaagcttatgaaacactctttatggggtatgagaacatagaaagtatgtctattaggtttccttattaaagactcttttagtatcttgttaataatattcacaagagaaatatatttttcaagaagagagatcattttatatttgtatatatcatattatataattacgtatattatttttataggtgtttaataaaccacacatccaatctactaacaacttaagtcatcacactattaactacaaatgccactactttccaacatttctcatcccattttctatatttatcacttcaaccttaatttactttcttcttaacatccaccctgcttaattttaaacctctgcctgttttcttttcttcttttctatttaccccctcatattcccactatcattggcctctactgccccctcacacctctcccattttactctattcttctcccttcacatccacttaattcttattctttatatcctgctctcgcttattttatatatctcaaactgctgtaattattaccatcaacattgtatattaaacaacttttttgttaattaagcagttattatggcaataatgttatatgtggtgtatcgatgcataaaagaatatgatgtaagaaaattttctagttacttgcatacaacacatatgtacaaagagaagactaaaccaacatataaacaaaatatctaatctgttcatccattaaggttacaaccatccactacaaacattccccttacttccatatcagctatgtatccttagagtagaatgtcttttacacagcaaccatcaatctttttcatccatcctgatctacattgtccacttaatttcaaattatctatccaatatcctaatactctcccttctcttcctttcccatcctgtttttacaactctaacaccactcgccccattctaatccacatatccttgtcctctctctaccactgacttacttctactatcttgcttctcatctcaatagctctttttactatatatcttctcttcttacaatactttctactccatccctctctaatattcatttcacttttcatactcacatcaccaagcaatcttacatatatttatactgccaccaatatcccattgtaagcatttcttcattattacatccatcaatattgtttgtgtctccttgctaaagtattattctgcaatcacccctatttccaatgtaatcaatatttcgttttatgtttatgtattttatgattgtacaatgcttcactgttcctctatatttctgcactatttttaccgttctcattatctcatccacaacacaacactctataacatcaggaatactatcaatctttgtatataatagacatatacaatctctaaataataccacaatcacttaattatctgccatcaacttctccaattatatgataagagagcaccaaagaaccgggcacataaggtaagctcattgagtactgttgaaggacaggtgttgacatattacccacactcaatcaaaactcactaaagtttttatacttactcaacacatacaacctacaaataattctttttacccatcactttatgcacataccatctgtattatttaacatagtggccaaatacttataaatacacatttcatactgctccctcatgacatgtaagttgtcacccacaccttgtctatgtcatatgtggcattatatgttctctgctgtttatactaacatatcacaactgctccaattctatcttctcttgctcttattaaaaatacctttactcgcttctctatactaaaagttactttattttatctctatttcatatcactccaaaaagagttcccctgtttagaaactctaacactagtataccaccactctcccatctcttctaaatattaaatcatttccatgtttactccacctcttccaccgttcgaaccctcaccgtcaccttttctctatcactagtactctctcttaacacttcagagatacaccctttatagacatcactatactttgtatatgtcgattctttttcttttatcctttgacattttgtttacattattctattacttcatgctactgttttctttgatttattcttctccctttgtatatttttatccccacaatactataattatcgaactcttaccacaactaaaatatcattattgactatgcttaatcctctacaatctgtcttcaccaccaatctctctattatatgtttcttgtatattcatcattgctgttccatcaacagtatcgattcacaaacaccataagtgaccccactctgacgtttcacaataggaatatctgtgttctcttatcactttacaataatctagcccatcttacagtcgtaaaaatacatcactgaaagtaatattttatcatgttcacaaaggtacacatcccgtagaattgccttattgcttagctctataataattattctataaccttcttatgtctgtcatactatatactctaagcacacataaaaatatgttttaggtaaacctgtacaagactattctttatttttcaaatgaatctttgtatagcagctagatagacatgtacacaaagtactgtacacacaccttcaaacacaacagtagcaaaaggatgaaacgaaactaacgttgatgtattcctatgcattaactcataaacattaaaaattgtctcaacctcatatcctgctaaggtttaggagctgtacagtaatgatcgttataacagaacataaaaacataaacaaactaatatcacaccctgttggcataatgtctctgtattgatatctctatgaacattttctttaggttaacgaattacaataccatattgctaccattgtaagttctcagatacgctagcatgtcagtagtactctaaatctcttttcttccacttatctaatacacaacacatatcaatacacaatctaattcttttcattatatatatgtttttataattctctgctcgtactacaatcagtttacactgccatccataaaatactacttgacattttcatctggcaattatgctaacactcatctgtcctcactgctaccttttttctaaatatccccaacattcctcccttatagtcttcactacactctcttatattttcatctttctcttctattctttgatactttgttggcatcttctcaccactccatgctatcgtgctttttcttttattaccctgctcatttgtacatttcttacccccctacgttatgattatactcctatactgctatgtacaataaatatcttttctcctaatattttatgcttctaataatataaataacatcaatatattagtttacacccatatcccaccacttgtttacgttatttgacaattcactctaagcaccatgtttatccccactctcatttctactattcgaaccccactgctatcctttttctcaccataacactgtctcttaacaacacacacatacctttcatatacttcaccttacccttcattttatgttattctattcttcatctattactctctcctttatacatattttaccctcttccctactctactactagacacttatatagttttccaaaaataaatacgtcttctcttatttcctgacactttcaataatacaagtaacatcagtgtatcatataacactaggatactaccattttcatattttatctactatttccatcttcactccacttcttctaccattcgaaccctcatcattaccttttctctgtcagtgaaattttctccatcaataattcatagacacatcctttatagaccttaccttattctatcacattctattttatactactttatcatctatattatcgtgttcatttatacatttcttaccctcttcttcacaatacactcacacttctagatattttagtaaagttaatttctcttaccttacatccatacattattaaaagtaacataacattaatttattatctatctccaagatcctactatatctctattaccagtactgtttctctcaccattcctagatacaccatctatagtgttcaacatactctcctatgattctattattctgtattgtctcaattattcttgttatcatttgtttgtttcaagttatactgtattttcctcctttatacctttcttactctcttctctaccatatttccatacttttgtaagaataaattctgcttacctcaattgtttgcacataactagtaaaaataatagtaatttatttttagcttccacattatgataccaatctggtcattgattataaataatagttgatctatgtgtgatagtagtaataattcagtggaatagttataggacataacttcactctagttctctgaatgtaatattaatatatatatctaatctactagaactaagtactgtgtacagaatatctcttcgttatttaatactcatttgggttgttcttggttcctctctttcactcatgtttgtgagttttccaaaagagaatcttggggagtattgctaaccctaatttttctaaaccaaaccctaaacaacaatcaagggatattactttttctaacgttatcttccactgtacacccatatagctttgtagaaattaattttcttgcctcaatcaggtatacccttgaaaaacaccagtttattattgtggactcatatattaccatgtttttcttcacttgtaaaatactttaactactatttctgttcccactctacctctactactgttccttcaatgaactttcgataacccttcgtagacttaccttactccctcaaacgaataatctttctctcttgttatcttggtccttacattactttattactatatatattatttttttaatctactactctcccgctttactatactccatacttctatgtattattacaaaattgaaatcctcttatcttaacattggacatctgtgctttaatactcgactctttaaatctacattctatatgtttttttatttcttctgtctgtacatactatacacatatacgtacatgttgtatatgaataactgaacctcttttatttatagatctgaacacccacatataatcttgacatcatcataaaatatttaatatccaataattgtgacaataagtcaattatctttcttttagtctctaatattttgtttttactactttcttctttcatacattttataccccagtctctgattttactgctattaattcagccctttcccaacaatacaataatttctctctgtacttccccgattatttttttatactattagtaatatttattttcttctatttaccacctctcaatactcaactaattcacacatcttcttcttcacaattcctatgttttgaaagagcactagtattaatctaatattatcacaatttatgagtcaagtaaatggtatttctgccttattaaaagcaacagatgtaagatatattatgtttataggtacaagctgaatcttctttatttatttatgattattttcaacaatgtagtaaaaacagtctttactaaagaaacctggtgattatagcctctacactctatcttttttcctcaaagcttttcaaaaataattcaaaatattacccatccactacagtcactcaccgtcttttcctcttaataaacatcctcttaactaatattaccctctaatctggatattcttctttctttatatcacttaataatttttcctatcaccaatttcaaatttacttctttgaatcctttagtaatatcaacacatatatgctggtatattgtcccctagtatccatatttactaacttttaatgttacaaattgacaaccactatttttctgttccatctatagttctctaatgattatttcaaaaataaaaacaacaacccataatccttcaattttcttgaatattgattaccaccctctctatttatccacatctttagatatccctaatatttaaacttggaaatatgttattcaatatatatgcataatattaaataaaaacacattatattacaaattggtttttgtttactttgtttattttgtatatacacaagaagtgttgtcaataaaaactttcctgtctcgattttgatattttacttgctttgaatttcaataaaacgccatatcatacagtaaacaatatgttaccactccaaacaaccagtgtttcatcttcagtcataaaaaactttcttgtccagatgaattcttacctagtcataatgataatacttcttactaatattatactgtttcttatttgagtagtactctagtaataattggtttgaacattatgaaatcattatactgatgtcttttatcatataaatttctcgaaccctcattagcttttactttaaactccatttgtactacaacaaaaatatcttttttatagatatttctacactctcctatgttcccattttatgttattctctgctattttctttatattactccattattttcttcttcttcttttatctaatactctccctatcttgtacacttaacaccctactttaatctcttctagatttacgttattctctttcttttttattatcagctatatacattactcacaacattagcctcattctctactaatcctctaactccattactctatcatctgcttttctcttttatttttgtttatgcccacaactctctttttagattacaatgctctttgctaatttatacttttctatcttctgcctattttccatttttactttattctatttttgttttgttactaattcctatgtctacctcatcattaatattgtttaacttacatcttttattacttgtactacttaaaatccattctttttcttgccttctttttctttacctgcctatgtattgtttcttatattctacagccttattccttatattcaaatattctgtatggttatgtcaatattacaaacacttcttttttatatctgctcttagtatttctcccacagcattaatccaattatcatcgattccacttgtttattatatttagagaactatttaaattctttattttatgacaaactccattattattcttaatattatttagatatcatgtatttacaccacctgctcgtattaccataatatagtaagttgtcaatataatatatcaatcatcttacctattttgaatattacataaccaacactaaatcaacaacgtttttacaattactatattcgatattataacaatcttattccatatacatcaactctagtcaaataattcaagttacttcaacaattcttttacctttccatgttttttaattcttttaccttattaatatgtatctttgactaacaatacttctaaaaataccaaattccactcttacctatttcttcttatctttacacaatatcctcaattattaatataatgtattgagaattggattatctgtacttagtaatttaattctttattctattactccttatacattaaatcaaccatttgtttacatcatgatataacatgtattttattgtatgtgtactttaccagtatattcatttaacagactacaaaagtaaccttagccaatggtcaaagttaagataactaatatctatatcacacaccggtgtaaatataaagaattatcaaaagatatatttaatcacttattggaatgaaatccatgtgtaattaagattgtagttaaatccacacaataatcttgataaataaatgtatcagaaggcgtaattgcacaatgaatactaataatagcaatatctacaaatgattaaacaatctcaatagtaagtttagataataatctgttgacattaagaaacaaaaaccaaactagcaaaacacatttgggttctgtgttgtttagtagtaagcaagaaatagtttatgcacatattataaaataatataaaacttaaggcatctggagaatatattagttataattaaactcaacaaaaacagttttttatagtcaagtagtagaacacatagtttaattcgataattaaaagtgtcacattgtgatatttttctcatggatatgtcaataaacaaaataaaacaccaaacaagaattacaaccaatacataaagaattatagcacaataaatattctgactgttttatactatgtacttatattcagaaacatacatactttattgcttaattatactttcagttgtatacaaaagtgtctccaagtattatatacattagttaaactgaagttactgctgtggtcttgttaatattcttctatgtatttcactcattatgtataattataaggacagaaagtattattattatcaaatatttagatgtatcatcaaatatatcaaatggtaatctattatttccaacatctaaattattaaacctggtgtctctctcgtgcaatttaattcttaatttatatgttgctttactgaatccttaaaacttaaattaaattattgtgattattaaatacaaatttattttgtttactctaccaatcttcataatttcccctcctacattttactgtgtatacagccactcgctattcccagactaagtcaatataatgatgtaaacatttttcacagagatgtatacatcaattatatccatgtcctgttgtaatcctatcattatcactatcaacttagtatcatccccatgtgatcaattcaaggtatcaccactaatccagcctatttaaatctttttacggtacctcttggaaatgttattaatatatctggtgtattacttccagtattaagctacctaaattaaataatattattatcattacgacctattattacccatatatgattatatacagaaaggagataatagttaggttatctaccgtaacaatttctgtcacttgtaacaaacaggatattctacatcatatattgaatatatatgaataattaataattatagcttcttttttctatagaattctacactatagcaccatctcaaatttaaaacctatccatattatctgcatatctcaaccctaacaagccaaataacatattatgactgttgatgacagattttaatatgttgctactaacatataaaagtatcaaatgttctatctttccatgataattgttaatacttcttcttacttttaatcattttgatataagtaaacaatcctctccttcatatacctgcttttctctgaccactccctttataaaatattatattatattaatcatactaatcaaaactatttatattaatatgggaacttccaaatttagttacttaatctgtttaaaattatttatgttccaacagaaatatattaaataaataatttttattttattaaccttaaaaaacctacagctttttcactggaaaattatcacccttaatatattttattgaacaaacactatactctgctactatagaatataaatgtgttttagaaagaaactaccaaacattaatctaaaattacattagcatctggaataatacttcaaagtggcaggtcttttatcttccttatataaatgttacctttaataagtggtcaattatagtttgatacttcatccaataaatattatgttgtatgaattacttaattacacaactgttttatctttagtccagcccaaattgaaaatttcgttttcatatatattcaaaaaaagattctctgttgccttaccacctaattttgttaaacataatatgtgctaattatttcatccctgaatagcatatgtttcgattatcatgttcttttctgaacatttatttgataaatctcatatactacaagaatattggctaatattgcaacttcattttaatactacctttaaaactcatccatattaagagggcacttatagttgtcacaactgggaacaacttgaatcttgctcaatcaaaattgttggaatttggagccttctgcgtccatggtaatgatagacatcattaagttatagatacttgttatgtttttgtattaaatacctgtacatatttattatatagtgtattcagtatacattcttttatttactttaagttttcttttaaagtttttcatttcttttcaaatcttcgaaagacatatttggtgacaattaaaatgttttcctgatattatgtacatccgtacaccacataatatatagaaaaactaattaaaaataattcttatgaaaatgacagtaataaactctcattttccaacaaaaatattacttacggtacattaaatatcatgtaaatgactagagttaatctagtttaacatataacttaatacatcttataatattaaataataattattgtattaaccgttacataatattatttcctttttctaaaatattttttattagctcttactatatcttcgtataatattaaatactacaatttttaatttttctattagataataaatgctacgctatcatatgtttattaactacatctctattcactttaattatacatacaataaattattatacttccatagagtgtatccccataatactaagatgtgcattgagtgttgtttatatctaagttatagttattcaatatatagacacacatctcttaaaagtacaattaatcactaatctaatgataatggttcttttaagcaagatagatagtaataactaatcataataaattattagctatttatcttatactatatcaagtatcatattttggcatgaaccaatgctgtattatgcaatataaataatacttagctgtatttatatgagcgtaaaatagttataccaacatctttaagtagataaatgactagaaatataatatatatttattatatcttcaggttttattttgtattgtcttgtttactaatttataataccatcataaatatgtcattaatatgctggaatcatatattacctgtttgcaaaacaaaagaatatatcaaagaggaaaaatatttgttctgcacattcaatattacagagataagatcaagcagaatcaaaataaattaatacattatgaaaaattgccaaaaggtaaacatatataagtagacgactttactcattaattttccaatatggatggataatttatatacattctatcatttgtttcttttgtatttatataattgttaattcccaatcaagagatcgagggaaaattactctacatatcaacataataataatacacaataataacatatagtatgatcaccgacgctaaagacatgtatactaatattattcatctagaggatagatgatgttagaatctttacattaaaaatattactataataggaataatacaaggcattttctttcttcctcatgtaatcgtgaaaaggcagtgattatattaaggaccagtaaattcgtttttttttaggttcaatatacccttgggatttatagatactaatttatttgtccaaattacttcattttgaatggcaataaaataaattaatctgcactcttattttttcatttttgttttctcaggtgcaatactttcttaattcttttgtctgtatattaaattaaaggaaaaatagacaaaaataagatattaaatggatctatctggttacaatttcgatactttttgaagctgatctgatagttgtcttgcaatgataataaaacagcaccagggtagtggacaaattttaaaaagaaaaaaaactgtaaaaattggagatatgaaaacaacacatgatccagaatatggatttacttattgttttattgaaactctttgacactgatttaaaagtgactgttaagtttgtaaataaaaattttatcgtatattaacaataattctacatttacttcgctgttttgtaaagtgtgttatattataatagctgcaaatttattatttaaacaagaaatgtttgttgacaacaataaatttattgttgaattaagaaaaactttttacaataaaaaaagaactatctaaagaaagaacaaagataaaaagattatccatctatgcttattacaataatacaaatggtatgtgtatagaggatcaaaaaggtctaacataacaaatatatcgtatgattttttttagaaatagaatattctggagtaaatagatagaccgattatatttcagcaaatataaatatatatcaaaatgcagagtgtgtattgtttatttattggtagatataaacaaaacaaattagcatttttttctagccctagaagggatatcacggataaaaaaatatgtgaagccaacaatttttttatactttgtttcttttcttgtatacgttttacatactatcatcgctgtattttacatatattcgaagaatctaagcttaatattgtgttgaaatagaatgttctataatgaaatagatagaacaataagattttagcagacactaaatgataaattgttgagtaataatcgttgagaggtcaccaaaggttgttgagtttgtttattaaatatcttactgttcgtagaggaaaatggctgaatgttaatgttgagatattacccagactcaatgaaaattttgtggaaaattttttttttttctcaaaattaactttctgaaaagtataaatagttaagatgtagaaattagaaataatttcttttactcacgactttatatatgtaatacatagttttgtatataacatatgtattatttaatactgtgagcgattacttataaaaatacggttcataaagttccgttttaacttataggttattactccacaccttttaaattttaacagttaacatatataaagccaaggatctcatcatacattatttttatcttatttacaatctttgtgtattattacttccatgttgtatatagagaaagaaagtgaagaactttattataattttgtatactaaatctgtttaatataatattgaaaatgtttactatatatccaaataaaggtgctcattctcaacgattgcaatatatatagacactcactctgtcttaaatatttaatacaaaaaaaggtgcaatcgcgtagttgtttccgcaccaatcctatctttttttaactacataataatttcactctccattttccaaatttataaatattctatttcaacatttttataaccaccaccagattctactactctctagctctcgatacatatatacattaccaaatgtattctctatattacccttccttacgtctctgttctcttcctcgtgacaccatcaattctctgtcccatgttgttttttccgcggaacctttatttttccacggaacaactcattttgtttttgtttttccaactcccctttttgaatttcacagaaaatcacaaattcctcgaggccgtggaaatgtttttgtgaaaatttagcagaacaaatttgcatttccaaatggctttctcttttttcaaacatgaaggaatgaaaatatgaaaacaaaaaaaaaataacatggaagtatctttcatcaattaaaagagagatctgatgtattgaactattttgtattcaccttagcatcatgataaaatataagctagatatgaatatacattctcagctgataatacaactactttaatacagtttcacaaaccttttctgtattctctgaactgtctttattcctattcaataactgtattaaatattacattgatatatcatattccagtatagcataccacaattactctagattgcaatttactatgatatttaatacttatatccatgtttactatgataatatcactaacgatctctaatacaattttttttgaaacaatgtatttcataacatacaacattatttacaacattaacatctacttgaactgaactagtcttaacaaccgactaactttaattatatttttattcatgaattatttatttcacttaataactctataacatcactgttagactatacatttaccatcgatataaaacacattcacattaaatgaaaataacataacaaattatactgatgaattgtttactcttaacttaatttaaacaggtcttcttatactgatatttcatattctttttttataactatcattgatatacattacatcacattttactcgattactctcaatatcacataccatcacctcttgactatcaatcccatccaagatcaccttacttttttttaaaatctgaaaaatattttgcaagaatcaacaacaataacaaccactccaacagatatgtaaacaggatagacacactggtttgtaagcgatcaactatgatccactcactttcatatgatataactttgaacattagcaaaccattatttgatataatgtgattatgccatcttatatttacctatactcaatacaaccaactgggatattttaagctatagacaacctacttaatacatatactatcattagggaagatatccatcaatgatataacttctttataaatatgattatctaagaatatccaaacacttcccattaatatcttcagtctaaaagaaatgattgcatattattttattgtatattgaataactatcatatgaatagaatatcaactgactacgaaatgataacaggaataactaatgaatgctcgaactagcatggatatattaattgtattttatggcttagaaatgaacattatttattttatttatatcccagtcacctgataattttattactctttgttagacatagcagcataaatcttgaaatgaagtacaaccttaaacattctggataataaataatataaacaaactctgaatatgtataataacttattaattattatactaggactgttttgttatctactctaaaatatgtgctatcttggatcttaactgtaatattaccaatatgaatataagtattagaacaagaacataactaacatgtttcaaactatctaatctgttataaatgatctaacaactcttccaataatgtatctataattatattctacattataaacatcacactagtagattattaattgtattaatttaacagaattatttgtgatactacaattcattatattaaaatgatctctttgattatcccaatactaatataacactatgacaatgagatagaaaaagatgataatctatatgagcaataaataaacctgctactattacttactgaagatatttttgatgttattaatattattaattattcatattccaaccaagaaagctatcattatttagaatgcttttatactcttaatagaaatttatatattaatatgtttgtttgatcatcaggtaacatatccaaaattatcattacaactatcctaaataacatcttactatctaacaagtcaaacatttctggcttatgtaatacaccaactcaaacaggtctctatatactatacccctaactctttctcaatctttatctttttcaaattcagtaaattttaattaatcaaagaacatttcaacttttaatcatttcaatacatacagatgtacaaataaaataacttgattattaataaatcatgtggtaacagttgtttaatttccaacaggaatggcatctactggtattggtataaaccttcataaaaatttaatatgtctccaaatttatttttctttatctaatgacatcatcattgtaaattgcaatattctaacagcagatggttttgtattatcactagttgactaggtagtaattacaactaaaaacatttgaattgggaaagtattgatgttgtacaattcattagagaactaaaccaaaaatgactggaggataattcacgtaactgtactggatatcattcagtatatgttcaaaagccagagagtgaaatcatataaaagcacaataaaaaactttacacctaacccacgtataactcatagcaataaaaaatagcttatagcattaatacactatatgacattaatcgttatccacaaaagatagacatttgctgaaagctgctgtttcatagaaaaaaacttcctgtttcattgtattaaatatctcataacatcttgtaaattgattactcaagctaaactaaggttctttgtttgaataagttagataacactgtataaagtaggaaaaatcaacttatcatttgatagtaatactcaaaacgaacactattccacttttctcaattgtatataaatatggtaactcagataaaataattcctacagatcagcacaaaacctactttctgttgtgtatcccacacttaaaccatttttgtttttaattacaatatatttacaagttcatacatgtgtattatttgatttaatactgttgattgttggatattatgttggtgttgtaagaactgacaacagtgttatggaattttaccacttgacagtcagtaataatgaataaattttcatgaagaaatttaatcttggttattggtagggtgtatttttgtgagtgattttaatgcaatatttgtgatgtagttgggtagtaatgcgatggtagttggcatagtgttgataattatactgtgaggttcatatatacggatagatttcatgatagtagtattgaagtgatcactatgtgaaattgatatgttatcagattatatcatttaggtggaagatactgtaagtgtttgtgtttatgtatttgtaaatactcatagtaatagggtaatcataccataaagatagatttattttgtttataaatatcttccttagtaataacccatgtacaaagtggattgtcgtgaatatactctctatagttaaggatatcttggttggctgtatcaaatatatttatggcataattatatcatgttgaatggtagtatctcaatgttatataatgtgaatttgtgaagtgcatagatctcaactgaggatgtgttttcatctgtaagcaagtctttttaatgttgtttgcatggtgtagtgattgatatctgtttgagttgtttttatttgattgaaaaaagtttttggaatttaagaaaaattggatttcagaaaagaaaaagaatgaaaagataagaagacaattttagcatatgttggcagttacagttctacaagcagtgttatattaactaactagtaggtacagatcaagaaagtcgtctaagaatgaataagtggctattctatattgtttgctatggtatggcataatacgcaacaaaagatagtattgtgcaaagtgatagttgtagtaggtagtgtaatgttatggtacctattactgggatgtcagtaaaagtaggtgtattaatggacatagcactttaaaatattaactgtatgatagagagaagagaatataatgtgtagaaataaatctgactagtgagatattgtcgtggtgttatagggtattgctgtgtttgtggcttattgaaatataattggagatatctttgacaatctaaatttatcatattaaatgagtgacacaatatcgtgtattttatttatgtagaataaaaaactaagcaacatgagataaatttacagcaccaccaaccctattataagtaaactgagaactcatcatactaccaatattctattataagtttatatcagttcatcatgttaatattataataatttttaaaaaggttttgatacagagaccatgaattaacatatgactgctagtgtcaataacatcttagataaattttcttattctcttgaaataaaatattccagaatgaaatacatagaaaaaatgagattataacagataacaaacaacgaaactatttgtacatatcttactgttcgtggaggaaaatcacttgatgtccatataaataaaactaaagatttccttgtatcgtaccttaattttatttgcactttttgtatattattaaaagcatgttctgcataaaaagtaaagaacattgctataattctgtgtacaaataattacataatagtcatagaatacagttgagaatatatctggtttattcaatacataaaggtgtcaattctcaacaataacttctactatgtctcatagataatgcatatagtaagagtccaggtagctattaactattaataattgttggtaattaaatatgagatctaaaaaaagtgttaagttagatcatggatcccattatgtaatatgtattacttagtcaatattggttatattggtaaagttacatttttattattaggtctggagatatggagtgagtctacatcttttatctatccaagttatctattaatattaattccaagtcgactattatcaaaagctaataatcataaggttatcacaattggtagcgtttggtatcatatcactgaacacttgaaacttctaaagtggtgtaatctatcatatacaaatatagttaattcaaactcatatagatagtagtttacgatacaacaactgcagcctgatagaaaagtaataatagtgaataggaatcaaaaaggaagagtggcaattaatgacctgtatcacattggatccaatgaacccaattatcggtgtgtgcaagacacatacaccatgatatttcccaatcttcatctttactgttttgttccactgtatacatttcgtaaaagttcagtttctatctactattaacgccatttcccaacagctcttccaacatactttgaagtgaaaccacaacaaggtttatatttccaagtagtttatcacagatatgtgaatacgaatgacgtaatagaagatcattgttcttctattaaaaatgctgcctgagttatgttaactactttgtaaaacactatagtttttcttattcaatataatcccattgcatccctacaatattcagtaataattattatactaattctcacatactattatcatctatttctataatatttgtttttattagcttttattttatcttcatataatattgaaagtttttaatacttattttaaaccgattcttgcatagtatgaatatcaatataatattaaatattccaatcttaaatttatctattaaaaaacaaatgctatactatcacgtgttgattcttccatactaatatcatataggtgtttattaactacatctctatatgctttcattgtacatataataaattattatacttctacagagtatatccctataatagcaatttattttatgtctgatcaagtatcatattttgatattaagcaatgctgtgttatgcaatataaataatactaaactatttttatacatgtataaaatacttataccataaaacttaataaatatacaaattactagaaatatagcatatatttattatttcttcaggctcaattttgtatcttcttgttcactaactgataataccatcacaaattacatcattaagtactctccatctgttagtcgtaacgaaatgatatggaaaattgtatatgttgtgacagttctagtcttaagcttattaacagtagttgagtttcaacgtgatctaacaatcatatttactcatacctaacattagcgatctttctttggacaagcatttcaacttacttatttaattaaccctgtgaatacctgttttaaaatgcttagtttctattactgattgtatataataatttatatctttacaagtattaaacatatcaagaatatttacatatttattaaaattattataaacacatattgtatttaataataatttaaggataatatatactttatgctaatgaatcatagaaatccatataaagggcctattaaaataataacaaagtcaattatattatacattttcttaatcattaagtaaaacggacaagtcactttatatgaggtataaatagtgagatgatggtgtgtaaaagatagttcatttttctctattatttagtttcttcatgaaattctagcattagaagtattctctatatggaatagtaataactaaatcaaactctaactagctaaaatacaactgtgttaggattgaataatattctctgcacgtcttctctttaattattatatatatattatcgaatcaacttgtttcagacttaaaagttgttagcttacctggtagtttatcccctaattcctatttataatattcaactctatgtaaatatatatcttttatatattataataaatattcaatgggggatattaatcaatatacttattatatgttcatttgtattaatatataccactataatatataaaataacagcttatatagacctatatttccatatggtatagcatatttagtaagtactgttatttaattaaaatatcttataaggatagttaataaatcacgatataaggagctgtatatatcaattgacagtattgatatgttcataaaatagtatgaggatccatgtgtgtgaagaataatatatcgtatgaagcagactactaatactagattatatacataagatactactgacaacacagtgatgttatttaaatatatatacaccttggtatataattacttttaaatgtccatttccacttcacatttactggaaatactatctcaacggtacactctaaaaaattctttttattactgatctcacatataactacatatatttatctctctcattactattatccattaaatattaatttttaagaatatacagtacagtttcaatatcacatattgatatatcatcatttctcgttatatacaagtatcatttagtgttcatgcctttcacaatatcaagaatgtaatctccttacactctacctcatattacagagctgttgtgtcaaactaaatcaccacatctgcaatatatcaaccacatttgtttcattctattaacaagcacttattaagcaactaccactcctgcagttatttttactttctcatagttttatagtccacttcttttttcattttttaataataatattttacaagttctgaaatatcatctcaagaaacacaagagtaatatgattctagcaacaagaacacacaacaatataaacttacttagattaccgtattttttgccagtatattatttccatatttaattgacaatgaaaattcttcaatacctttataattctttatttgtttatatgatttaatctttatcacaatctagcaatatacaattattcttatccatacagttgttgaattatgatcttgttttgttttttgatatactatttgcatagtaatatctttttatatcatatggaaataattagcatgtgcattcgcaatcaacaatcactttcatttactaattcctgcacatcaacaaaatacaatatactcaactatgttacatctaatcctattctatatgtatttcctctttaaattagttcaataaaattcaaaaagcatgatcacgagaatctaatattgttcaaaaatttcatggttgaatcttgtttttatttataaatagacagtgatctccattagcacactgttattaattcttttaccaatcaatttcttattctaacagtatcactttatttatcctattttatcatttcttataacatcttaataccccttttatattggtcatttgtttgttatttaattcttagaagttctcttttcttaccattgtatttcaacatatatattcttactctctttcaagagttatcatgacaatgaaatatcaactttaccaaactactattttttcacatccatctgtttgcttcgtgaaattcagatatattacattatctcttcttcgaataattgtttcatataacttattctgtgtttattattcataataatattataacctttggataaacgtatcttctcaccactgatacatcatcatatttccatacatttaattatttcttgtaaagtatcacgccttcattataccttatattctatgttacttctattgttatatattagaatgaaatttccacaataaaaaagtagttattatagaataccactattatatttgtcagctgtcttatattttaatgtttttcaatacagtataagtatggtatctaagaaggtatgcaacccactcagctcaataaaaataacacacaatatttcaaatagttcatgtggcacgtacttgtgaatatttcaactagttctattacaatatggtcatctagtacaactttgctttttgattggttgaaccagtaagaaccctatatagtgtccatcaaatggaatatgcaattaggaacatcacattagttacttcttgtatagttgttatgcaatatcacaaaaatacagtctctagaaatagtatttatatgacttaacctaactacaataaaatatatttattaaatattgttgcttgtatttgttcaaattgtatgcacattagtcattactccgggttgttcttcaatccttggatgattgatattctaatatacttttaaattggcagtgtcattcttagaatgttgtgtttagtgttcttgtatactcgttctttctagtgtacagtaaataaacagaaaatactttcaaaaggctagtgggaaagtatagagtgaaccacactggagaaatctagcagatataacatgaaatatattctaatcgtagcattcattgtttaaactagttacttaacactcacaaagaaatatactagtcaaaacacagttacgtgctttgtattttttaaaatttttaaatattttttctcgatgtcatcacagaatttttttgctgcagcagtttttccatcaacgatgagatgaaaagtagattaagagaagaaaagaagaaaagagtatttgtagtaattatctttaaatagtgatgttggaattcttattaaacagaaaacaaggtttcaatatgcagtggtatattttatttctaacatggattggtgtatactcatgatgaacaattgaaaatagttatttttgtccttttatgatatgttatataatagtggtagtaacctaccatctttaaaaagtattaaacatgatatctcaatatattcatagtgtgataatatatgttgtgtttttaaaatatcaatataccttcttagatattatcatagttcaactattaaatgaagtacattagcatttcaagttctctggatagaagtctgtttaaagtgttctttgctatgctagtttattaaactttcattatgttagtatatatggattatttattaatgttcagttaaattattgtggttttataactccattatttgttgttgaatgttaacaatttctgtgttatactgttacttttattatgtcgtcgaaatagaatatttgagaatgaaacaaatggaacaatgagattccaacatatgacaccactggaatgctgaggaactgttgcttacatgtcacaaaatgttaataatactgcttgcttgatttttgccattcatagaagagaagtaacaaaatttaacatacacaaagacaacattttttcaaatcgtgtttcttttcccgcatacttttcacatattatcatttctgtgttatacatacagaagaagatggaagaactttaatacaattttgtaatatatatttatccaattacagtattgagaatgtttactatttattcaatgactacgagtgccaattcttaacaactttaatatactgtaataaaatatatattgttaatgtgaggtgtgggagaggcaactatgaatttacagaatgattattcatatgctatgactattactattattcaaagaaatcacaatccacaaaactatttctgaaagtatttccttctctcttatttttgagtttggaaagatcattgcattctgacagttaattttctagaacagtagttgtcataactttttcaaatgaactataccatagcactcttgagaataaaaatataaattgtatatgggtaattgtcaaagaattcattttctgtaattgatataatttctgtattagttatacaaacactcttacttatattcagatatagtttttaacttgttgttgttggccttattctatagtaagaattatcttctgatatcatccccaacatgaatgtataaagatatctatgaatgtatttcattatcacgacaatacatcatcttataaattacttatatccctatggatcttattaacaacaaaattattatgttaacatcaggataagttccattacatgaaagtatttgcagacacgtaacaatcgataaaatattttgtaaaatcttgtattaaacgtcaataaacaaaatagcaactattagataatcattttatcaatctttttttctacaaggataagacaaaacagaaagaaactattcgtttttatgagtctatgattgtatttctgctgtatttatccagtttttgaattgttttgaagaacacttttaaagtggtatgatgggaaatatttgatttttcttttatgtttttttgacagcactttatcaataatattcttgcatttggtttaatcatcatgaaagtttgggaaatgtcatatcaattcttcgtatatttatagttcttgaggtcttgaatatgttagcttatgctgttttggctgtattgttgttaaaacacaagttttttgagaatcaaaagtattagggtgttgtttatattctgtttatatctatttagctagtattaattcctcacgttttgtaaatagtattgaagcaagatatccgatttcatgaataccttaatatacaatcttgtgatgagaagatcaacccaaaacattacaaaaatttgtagatatctacagttgtaattatatataaataaagagttgttacaagttctccagagaagtgatctttatttatatttcagaccatagtgctaagggatctgttttaataaataaacaataataatagtatttgttgattggcttttaacagatgtatcaaaatcttatactggaatgtattctaattatttcaaaatattttttttcttttgaatattaagccatacatagcctttaatactttttagactgtatgaagttggttgtattgcaatctcatatcagaactgagtatataaaattttattgcttataaaataaccactttatattttcccttgtggtactctttatgcttattaatagtatttagtcttagaatttgtttttcacaacctttccttttaattgtttctggttttagtctaacattcatgtgacagaattaacaaattatattagtcaattatgtaacccactcatatcatactgagtttgttcccttcactactaatctgggatgtttcttttaagagttaatgtcgtataaatggataaaagagtttcaattaatataaattttgactgctctcatttagcaagtatatatggtatcttaagtattgttattattgctatttctcaggaaattaattttaatagatgtctaaagataatcatctctaacttatcaccatgttttaaaggtatctcaagaaaacctgacctggttattactaacgttgaattcttcgtttatgtcgatacccatgtacgtagtgttttatattcaaacatatcaatccttcatctgaaaacttgactattttctacaagtctatgtatacactgatttctagtcaggtcccttacatagtatcatgtaatattaaaatgaaacagcaaaataaaaaaacattaagagttaataaataacaataaaatgggaaaaatattaaccaaaaaaaaaaaaaataaaaaaaataaaataacagatacgaaagcaatgtaagtcttagtaacataggtttaagaaaaagttgcggcttagcccattgcaatttttacaatctaatagaacaaaaaatacatttaaataaaattttttctaactttacatagatatgtaaaaaaatttcatttaatcatatgagtttgagtttctgatatgtttagtttataataattgcacatctaaatatatactacagatagtaacagattgtaaggaacgagtatatttaatactagattgaatattagcatgagaaatgttagattgagtactttttgtagacataatcgaatttctatacttctcttcttttatataatataaacttattaatcattatacttataattcctgacttcttacttctagtattattcaggattttccttctttgtatattttatggttttgaagtacatacaagattctaatatctggtagtttctatttttagaaatgaaatatatcatatttcgaggcttaacctattatatttgtaagctttaacattttttcttagaatcttgttcaacgcagatttctgatgaacataaataaagcagtaagcatgataaaaataacatactcaatgaaaaccgatctttcgagtgtgtgtagtttcaatatttttctggttgctttaatagatggataacggcaacaggttggaatatttttaaataacagggaataacttagagtcttgatgattaacagtacaatagcatctttcaatgttcctgatatttctccaagatatttttataatcaagatataaatacctttcaagatggataaaacgtgaaaaatgacaaatttcgcaactctcgttgatcctgttaaactaaaatgcgtcagtagagcaatgataaagacattataatttgcctctattagaattataccaaatagaaaggaatccttgacgaatctttaatagcatatcatcattaaagcatatgtaaatctcatctcaaaaacaagttcattatatggtaactgtcaataagtgagttgaaactaatgaactatcttaaatcttgaatatacgtttctgttgaagtatgtgttttacatgattaaatcataacaacagaaacattcttacttcttttctagatcttttctaataaatatatcattaagtttgcatttcattgtaatgtttttgagctcttatcctattgacagttaatacagtgtacgtttttggttcaaaacctttgatatcacataaagttgtgtgaagacaagaagacttagaataaaccaaagaacttaactgtattgttataacaacttcaacacatttataaatttataaaaagatatactaatgcttggtacatatattagaaaagataataataatatgaaaatacagcggtatcataactaaataacctatttttcattcaaatgccagggcagcatcccaaaactttatttcaaggtcacatacctcaccatagattctgatcaatttttcaattccctctgcagggtaggtacgagctattcggtttaaaagcgatacaccaagtgccatatcttctttaaagttttcactagaatatattttgatccattcatcatataagccaccttcagggacagtaaccttatctttatacttcatagcagcaacaccgtaacctatcatacatggagttaaagcagctaccaattcttgtcagttgcctctcctagctacatcgttaaaatacttaaaatagttgttcaaatcaggacccctcttaatagttttaaagtatctatcatctttaacaccgaatttctcctttaatctctttccgtgctgattcatctcttctttaattctgctaacaatgcataattctttttctatatcttctaattctggagattttgaaccagcaatacaatgcactctaccatagttaaccaaataagaataatcttgttcaacgaaaaattgaaatttctttaacggtaaagtaccatcagcaatttgtcttacaaagtcgtggtttacataagtatcctaatatggtttaacgagtggatgttcaattagatatttgtagaagttttcaataattggtccaaacttcaatggtttaataattgttacaagttcgtgagcagtgaaacattcattttggactatcttttctaatggtatctcgatatgacatgtatagtttggtgactcgttgtcatcatttttaacagaatgtgtgctttgagcatattccaaggcaccataaattgcttcgcttagattgaatccatgagctatattggaactgattgcagtagaaataataccgtttaaatctttagtttcaatatgtgctttaaagatgataaaatcttggaaaccactagtgaacaggacatcgttattattttcaccatcaactctacaatttgtaactagaacattttcactagaagtactttctgatatttgggtagcaagttcaaaaacatcttccaaagttttaacgttctttgagacttttaagaattcttgtgcttttgtgatactaacaacaatcagtatggaatttttaaaaacagatcttttcatgaattcataagtttcactatttaaagaatcccctgatataataagagggatagaaacattcttgaaatcctcagctagcaaaacaacaatatcagtatttatttgaccaattttggcaaagatttaaacttttcagataggaatgtactgggtattacaaagtcttctgtattatttgaagttaatttggtaattaaagtttcaccattacatctatgagcggttgaaaatttgagatctgtttccacactgtctttattagttggattagattgtcctataattaaaatacttagaatcttgtcatgtttacgcaagatcaaatattgggatggcgtgttaatattataagaagagtaggtcatagaaacagcaatgaattagagtaatggggtcctaagtggtagttctgtgcctttttcattttttggaataaaattgagaacataaagagtgaataatttaagtattgcactttttaagtgcccaatgatttgttaatatatatatgtgcgtgtgtgtatgtgtttatatttctgtgtttgaatgctaggttgtttgtttgacgtttgaatgacttttgtatgttactctaaagatttccttttaaattttttttaaagattcacttttatagatcacactgaaaaacaaaaccatacatgaataatttttcgattcctgtatcctaaatcaaattttctttccggcaaacgaacgtagaataactcacataaaattatattaaaagaaataggttcttttcgagtaactactatgcagtaaaaaaacgtccacctaccatgtcgatggttttttttcgaatagtaccgtacagcaagatgatcagaatattgtacttgtccatctttaaatcttccaaattgaacataactttttcttgagcctttacctaagtttaaattcaacaaattctttattaataactctaatcaacgagccccaaagtgttaggttttatatattcctgctattctgtaattaggaaataatgtttaaaagctttcttagtatagtaaagaaatattctcgacagaaagatttgaaacaaatgtgtatatgtgcgcatgtgtcactaggcatatcttacattaagagacatgatataaagaaaatgattcatttataagcgattactttattaataatacagttgtagatcatcaacataaaattctgcctttgtttccttctttgataaaatacattatacgacaaattaagtttgttctatcaatataacagaaataaaatttggtaatagtcaaaaagctatataaaactatgtatgtaactccttctatatcattgcttatattttgtgtttaatttttgcaaatatcaaaagtacgttttaaaggaaaatcccaagaattattttgtagatgataattctaaatgtaaatcttaattaaacaattcaattcttttttaggacaagtctgagcaatatggttcaagaaatatataccctttccaatagtttttttcagaggtaaaataaactaaaaactggtctattttctatgaattgtgcctggctcagattctgtcttatttacatatatagtcatatctgcacattattcaaccatacaagaggctaattctgcggttagtttacgtcaactttctctttttgcaaggtcccgcatgtattcagtatgttcataaaaaatattatgtgatctatcagcaaaagctgaactgaatgtcataaatatagctgcaaaagttgggttgttaaaattggataaactgtatataaatacaagactaacaatagattccaaagcaggaaggaatcggctaaaataagattatctaatacttagaataaaatatcttagaataagattagaaaggttgaaagagtgtgtgaggaataataaagttgcaatgaggaaaatagaaaggaagaaaaaagtaatcgattcactcacaaagaatgttcaaaaagagtaatgtgaacaggtaagaaaaataatacaacataaattaagagcaaatatgttgctttgaatcgtcttttgcttgaagcttggtaccattggatgtttatatgttagtggagggtagcatgaagataagaaaaaaacatcttttcgagagtgtgttgaacttatcattataaacaacatttatttaaagaagtttttatgatataaatatcgtatgtggagttcaaggatatgttcaacttaattaccaaacggcaaggaagcaatgataaaaagatgtaaattcacttatatacagtgaatacatacatacatatacatacatatatatatatttgtatcaaataataactaccaaaatatgcaagctatcatttgtgaatttttcagtccatattactctgttataccctgtaggttataacctcattaagtgtaacatagcacaaattatgctttccatgctaaccagtataagcaaagagtataataaaaaggcaaatatagaattattaactttgcatgttacatataatttgtaattgtttatttactttttttttgtaaatatcgaaatattaactgagtttgtcaatgcataactttgttatgtactattacctctcttttttgatcctttatctagagtttttatgaaaaacaacatcaattttgttataagacaatttcaaatacatatatacacatcttataatttttcatgactttatttagctttttgctgaatagataatatttattaaggtatctttctaccaatactgtgtatctttatgtgcgtatactatttttttgtcccacttcccatcgtcatattaacgttttttccctttttttcatttgtgcgaatgccaaaccaagaaaaacaagacatgtgattttaaatatgacggaaattttttctgcgtccttatttaagccaacattgtttttcttttgccagattaaggcaaaactgaaaataaaaacaacaacttaagatttggaatagcttctgtataacatatcactgtttcttttttctttttttaaatgatcatacgttattaaagaaattgttttctatctataattattaaaatgattcacactttataaagcaatatatataactcctaaagactaaaataattaggataaagcgataatgagtcagggtggttggtatttattttttgtattgatctatttatcaatctttttttttgttaatttaatgatgttacatttgacaactaagaaaattgttgataggtgtggtaattcatcaaaacgcgctctgcgtgaacaattttgaattaaaatgatcattgattgtacatagaataatatttattaattgccattcactataaaataaaaaatgttttgctgtcgtttaaaaacttctcgaatttaaaaatactaaataacaaattcttctgtaaaggttccagtatatgttagttaaggatagtatcatgtgatatgtatatatctgcaactttctagaggcattcttctaactgaatcgtttgttaatctgcaatataccattatgtttgtgtatgtatgtgtatatatttaacagttacaattaacttctgtatctatattttgagattttggacatcataaataaaattagcaataaggtaatttattatgttaaagtttataataatgtaatcaaaatctttatttctatatgcaattataacatacataaagtatttgttgatttatcatttagatttcttcatgttttttctgcataataacaatggtctatggataaaagtggaatactaaagtactaacaaattttttttctaatgtaaactttaactgttggcaaaacaaagttgtgggctaatgaagaatatactgatgatcggttgaaaataacacaaataaaatcaaataacattagacaagttttattaatatcattagctataaatacaaaagttcgtttttgttttggttattttttatctacctctacatacaatgatgttattgaagtggaagtttcatattttttttgttcctttaattttttctgtttgttatttaaaaaaatgttgtgaaaaaatatctatctatttccttttctggtcatactgaaggaacacaatagttaaaaagtacgtcaccctttttcagagatttcatgtttttagacagatctgtttgaaattattgacattccttaaatatttgtcgacgcataataacaaggaaaacctctaaattgttgagccagaattggttatatttacaactacaattatattaaattgaaatgtataagttatatatgttgtgaatttttcgttgtttaacgtttaccctttttattgttttgttttgtaattataatacattttggaaaaatgtttcatttgataataatcagctaaatcttgccaattgactaaaagcgtctggatcacatccttcaaagttatgaccaaaagtgcgctcttgttcaagtattaatttaccagtagaaactagttgctgccaatttcctggtactttgtcattcatgtcaactatacctagatcactataatagtgtgacataatattaccagcattttgatcaacacgattccacattgcatcccaatcatatctactcgtaagtttgtgataatctggatggcatgcattatattttagaccataatagccatcaaagataccatgaatgtcctcatcccttttctccaaatcacgtttggtatttgctccaaagtgtgtcaaaaagagagagaccgaactatctgttttatgggcatcaatagagaaaattggggtcccattaagctccactgtcatatttttataagttaatgaatcatcccttttataaaattgcgtgtgctcgtttgccactaagttaaatggtccactcgcatataacaaagcacgtccaacttgtgtatctcttttcaagatagtggcaacaagtgtaccaacacctacaacaaccgctgctgtcatcaaaattgcagatatggctgagcgagcgcatgcaccaccactataggttccactttctccctctgtatcaacacaatcatctacaaaagttttccatttatcaactgcatcagaagctgaaccaagtgtactgcttagtaaaccccaccaagcaccattaactcgtggacggagttgagaaggactataaactccactacccacaatgatattaccattttcattagtacatggaaaggtaaaactagtattacacgattcatacttggaattgccaagcagcatatgaatacaatcctctttgcccatacaaaggtcgattacagaatcattataaacagctttcgttaatttacagatagtaaataaaataaatgaagcttttaatagccaattgccctccttcatgtttatgatggatgaacccttggatacagaatcaagaatgattaatttaatatttttttttttgctaatgttatgtttcagtgaatctaatatacaaaaacaaagaagatgataaatttttttcagaaaccaaaagaccctgctccttaaataatcttggaaacgtacttaaattttcaaaattgatctgttaaaaatatatggagctagtaaaaaatcttcaacagagaattacatcataggggctttatttgagatttatccactttaattagtaaccaaacacaattaattgaaatatcaattttgagctatttaatttttgtaactaacaatcaagaagacaattacaaagaaaataaatcattattagtcttatacgaaatttaattgtatgttcattgttttaatttaaatttacagtaaatgactcggaatgtgaaagtttgtaaaaaaaatttttagaaaagtgtactgaaaaaaaactttcaattcttttttagaaaattatatgcaattattaattttcacaagtatctaaaagtataatgagtaccgttttattctttacaattaaagattacaagttcctccaatttttctttttgggaatatatttgtcagagatcttttgtttttgttgttgagctttttagcaaatgaatctattttaatattaggaaggaatagaaaaattaaagcaccactatcctcaacataggattaaccttgtttaaacgactactgctgaatgtttcatacgacttttttttaaaaccatactagaaagcgtttcttaaaagtatcttcttacatataatatacaagaaaaatgttaaaattatctttaaaaaatggaagttagatgttagtgccaatcttattcattattcttgggttttatttatggttgaatttttcgcaatatacaagagattgttctgggagatctgatttcgtacctattaaacaatatttcttagtaatgaaaatttgtatttctcttttttactcttattccttttcttatgtaatattcgtttaatgttttctgttgataaatagcagatgtcatttgttgttagatattactacatacagttatgcaatataatttatccctatatgtaagccactagaacaaatatcacaatcatgttatatcttaatcacgagaactttttttttgaagaaaaaaaaaaagtactttcctcaacaggaaaatattctgtatttagtgattttatacatacatttttgagggacattgcattttctagtctttacagcgttttcatatgctgtgttacataattctatggttcccaaatagtaaaattgaattggagatgcatcaaacattatcaaaataagaaacaaaaaatactcacataaaattatacaagttaaaaaagatacaatttattaatggctaacatttgaatgaacaggtgtctttagtttatagaatcaaataatgaaccccttcctgtctctattcttctgttattataaacctactcttttgagttgactcacaagaaaataaaagtgttgaaatgaaattaaagatgtatttaataatctaaatatatcgtaccaaatgattggaaattttataaaaagaatataaaatggaggggttaaaataaagtatgttataaactatgttgattgtatatgtatatcaattttgtggaacaaaagaacgatagacaataccatataaatctgtagtaccattaatttcctactatgaataacttaacttatgattctaccaatatcctatcttgagtatatagtattcaatcacaatgatctaaaattagtgataatagggttttttgatactgaatacttacttaaacagaaacattttttatcttgtctgttaaatgtatttgtttattaaatatatgctatataagaactatttggtaatattatacctattgtttctctgccatttatatcagaaactacagtatttcgattgattctgaaatggctaactaatattagtacacagttaacattagtaaggttgtaactatttttatttgatagcataatttttccaattagaaaggtatgttaagaaaccttaattggcaatcttgaaatatgaagtccgtgggtagcattaaatgtcaaggtaaaggatttggaacagccgaaactctgggtccaaagctatgaatgtattcgaacggatgatcataggattagtattgtggtggtaaattacttaggagcttagttgagacactattgatatagagaaatgaggttagaggtaagtatcagcactaatattcatattctatttaatgggatctacatggaagaagaagaatatcgagaataacaacgaataatctaattattagttaaaattgacgaatcataaaatttgtaaatgtttatatatataattaatattcgtattttaatatactacatataattatcctcaccatatagatttgcatattagttagcaaaagtagaagaaaccgtatcaattgtaaattactaattctaataaatttacattaaaaaatcctgggcgttcggttataacaaaaacgcaaatgttaattgtctataaataaatccatctgttaattcaaacaacaactactaaaacatacataccatcacttatggaattttcagttcatattgctttattgtgacatctaaatcgtaattctacctctctaaactgtgacatcgtccatattatcttttccatactatctactataaacaaagaatataatagaaagataaatttagaatgtctaagactacatgttcaatataatttgtaattgtttagtcttttttttttacatattgaaatattagtttaatttatcaattcatcactttgctatgtacaattatcactctcctttgattctctatcttgattttctattaaaataacatcaattttattataaaataaattcaaatatacatgcgtatataacatttagatttttatatatagagaataaattaaggaaaggaatcagacattcaactaagaaaactataatgcaacatatcctctcaaatagagtcaaattatcaatactattgattcatataatattgtacagtgtagagtacaggtatttttaaggtatgatatttttgatttcatagaactattagcatacatttatattaagttattttgatttttgtaaattagttttctctatatacatttcatgttcaattggatctttaccacaggcctctataatatatttagtatgctgcaacattgctaaaatatttattatcacaaagagcacaaaccacattacagaaatgatagcacaccatatcagagggtctattatatcttcagacatgattagttagcaggattaaacttgtaatatatatactacgataacttccttaagaaaacaatagcaaacagataacagaaaacagaataagactttatttagttttttgctgaatagataatatctattaaggtatctttctatcaataatgtgtataaagtatgtgcatatactatttttttgtcccacttcccatcgtcatattaacgttttttccctttttttcatttgtgcgaatgccaaaccaagaaaaacaagacatgtgattttaaatatgacggaaattttttctgcgtccttatttaagccaacattgtttttcttttgccagattaaggcaaaactgaaaataaaaacaacaacttaagatttggaatagcttctgtataacatatcactgtttcttttttctttttttaaatgatcatacgttattaaagaaattgttttctatccataattattaaaatgattcacactttataaagcaatatatataactcctaaagactaaaataattaggataaagcgataatgagtcagggtggttggtatttatttttagcattgatctttttattagttttttctgtgcttaacttcatagtattgaatttgacagctaagagaattattgataagtgtggtaatccaccggagtacgttctgcatgaacgagctatgaataaaaatgcgccttaattgtacatagaataatatttattaattgctattcactataaaataaaaggattttgtttttgaaatgtatttgttgtcatttaaaaatctccaaattttaaaatactagaggctaacctctgttataaaggccttattattaatatgataattactggtagaataatatgatatatgtatttatatatgactttatgagtatcttttttaactgaacaatttgttaatctacaacatactgttacttttgtatatgtgcatatatgtatgtatgtagttgccagaattaacttttgcatctatattttaagattttgaacatcgtatctctgtttctttactatattatgacatagagctaagcagacagtctaattaaacattttaaaagaaaacatatatatccctgttgtgacatcttttttgattcttttctttacataacttttaagatatcaagagaagcggttagatggttgaataaatattatgcaatattgaagaaattttttatcttgtaatttgttcgttatatagttaatccttaatggttttgaaaaattataaatttttctgattaaaccttttaactctgtttcttacaattatttattgggtgaactgcgtactatacaaatcattttactgcatagtttatcgacgataattatcttttagtagggagaataaatctatctgattaaacaaaacaaatgaaaactttacgcagcaattatcaaggatatatatgtatagacttccgtaaaaaaacttggagaagataaatcttactcaattaaataagacgaatctgtaaataattaggaaacaaatgtgaagttctttactatgagaatgaagtaaacattaaattgttaccaccttgtagaggagacaacaattagcaacaaactcgactcataagatcttccttactcgacatccaatcaatataccttcagaacgaaggtaacagaaggaagcaattcaccccaagaagggatttttcagaacgaaaagttaagtgaattgagagtaatattaatattccaaaactgtaacagagctaatcaactgatgtgctccccgaatatctctctcgcctaataaaggtaagatccgaagatatgataaactcctgacaaaaagttatgggttgggaagctatccatagttatattttcgcagaaaagaacaattcaatcatctgattgatcttgtaattatgtaaatatactatgaaaactcgattgtaaagaggtggctagggataaaagattatatttgcataaaatataggaacgtttgtattttcgatccacttgtattcatactggggtgactttttgaaactaccatgaatttgagctgggctagccatgtaaatacgcttgtaagattaagttgcgtaacgaagaacacgaatttttttttttaaaaaagtaaaggaagacaagctgacttctctttatattcttcctgcaaaacttgagaaacaggagaaatgaaaatgaaaacaaaaaaaagactcttagaaaaaaaaaaaacaaaaaaaattttttatagggtttttaaagaaaaattcgggtaaaaaaaaagaactataattgaataaactataaagctacacttcctaatgtacatcacacaagtctgttgggttaggacataatttattattattgtaaattgaagctttgacacttacaaaaaaaatattttgaaagttggttaagttaaatgttatcaacaaaagtcattcctagttcaagttttcaattatattgattgtaagtattaatttcaatcaatgaagtgttgttctcgtttttcattatttagtttattagatattgcaacttaaatttaggttgtttttctgttattactgtcaactggttaaaataagtgatttttattaaggtatttattggacattatatgtagctgttattttattgttgtgtgtattaaaaagtccgaaaatataacgacaatacaaaatgatggacgattcaaataataatagtctattttagaactgtattacgcatttatgttatatgaagtaaattcagggatagaacatatgcttatttacaggtaaaaaaggtattggttattagaataaaatagaaagggagcgaatgaaaaataagacaatatttactatgaggtgaactgaaaacatttattagctatttgcaaagacttaatttattcattaataagggtgaataatgtagaacaaagaaaaaagacatttcagactctttttcgaaacgagtataattgaagttattcacgtttgaagagcttcatatctaatttttagtatgtcatatgtaaatcaaaacgtcatctttttattattattcttgtcttgagcatagcagatgaattatcaagattgattaataagtcgttcttttttcgtcataaagaaaggatgaaataaagagaaacaaagcgaaacaaataaataataaaaaggctacttcatagttttattctttttttttttttttttcccaaatgacaaaaaagtaattgcaataacgataacgataacgacagcgatggcgatggcgatggcgatagcgataacgttctttatttttattggctgttgataagaagttacttattgatacccggaaaatgtagagtccacacaggaatctttttaagcgactttataatccgtactgatttcaaaccctaagtaggaaaggaactttttctttttttctttggactcctccccaagtataatgaacaccataaataagtcggtgaaaaaaaaaaaaaaaattgtttttcttaagtctgtaataactacacacaaaagaattatttacttattttgcgaatattttaatcttacaccctactttttcttcagatttaaccaacgcattatgactactcaagcgataccaaccctctttattttctttttttttttttaacaaaaactagagaaaaaaagaaaaaaagaaaaaaaaaggaagatgctttcttatcaaggttggacgaaagaagaaacgattcctttcattggcaagagataaaccagataagaatccttaggaaaaagaaattacatgtctttttcttctttctgacaaacaaaagacaattttccctcccgctgtgaaatctatctccaaatttgaatcgacagttgtttgtttgtctatgtggatgggttgtagttatcgtttctttttgttcctttttatccccctgtgggtgtatgcgtaaaaatcatactattcacaattattgtccgcgcacaacttttcctgttattctcgttgcccttgccttcatttctttgtttctttgttttttgtaagatccctatttcgataagaaatcgggctacgtttttgtcgatggcattcaagatcgaaaagtaaataattagtaatcgagacgagatagtggaagagaaggagggaaactgaaacatacaataaaaaaaggaaaaggaaaaggaaaaggatgaaaagaagattcctttaatatataaacaaatgtctttttttgtcaactgataacaactgcttgtcttttttctcgcattcatctttccttgttgtacattatgcagctccagggtgtaaggcatagaacactgagctgttgtataatttacttcaaattcaccaacagtaaacaacaataatataaaaagtgcatataaacgtacaagagaatataatcgaatacatacatacatatataaagaatggctactgaacctgaattccaacaagcataccacgaaatcgtttctgctttagaaaactccactttattcgaaaaacatccaaaatacaagaaggtcttaccagttgtctcagtcccagaaagaatcattcaatttagagtcacctgggaaaacgacaggggtgaacaagaagtcgctactggttacagagtccaatacaattctgctaagggtccatacaaaggtggtttaagattccatccatccgttaacttgtctattttgaaattcttgggttttgaacaaatttttaagaatgccttgactggtctggatatgggtggtgctaaaggtggtctgtgtgtcgacttgaaaggcagatctgataatgaaatcagaagaatttgtagtgctttcatgagagaattatccagacatatcggccaagatactgatgtcccagctggtgatatcggtgtcggtggccgtgaaatcggttacttattcggtgcttttagacagtacagaaattcttgggaaggtgttttaaccgggaagggtttgaactggggtggttctttaatcagaccagaagctaccggttacggtactgtttatttcacacaagctatgattgactatgctaccaagggtaaggagtcctttgctggtaaaagggtcgccatctctggtgcaggtaacgttgcccaatatgctgctttaaaagttattgaattaggtggtattgtcgtctctttatccgactccaaaggttgcattatctctgaaactggtatcactgctgaacaagttgctgctatcgccgaagctaaggtccttttcaagaccctcgaacaaattgtttctgaatattctgctttcactgaaaataaggttaaatatctggccggcgctagaccatgggcgcatgctggtccggttgacattgctttgccatgtgctactcaaaatgaagtatctggtgatgaagctaaaggtttagtcgctgctggtgtgaaatttgtcgccgaaggttccaatatgggttgtactccagaggctatcaacgtctttgaaactgctcgtgcaaccgctcaaagtccatctgaagctgtttggtacgctgtcggtaaggcctcaaactgtggtggtgttgcctgttctggtcttgaaatggcccagaactctcaaagagtccgttggaccagagaaactgtcgataaggaattgaagaagattatgatcaactgtttcaatgaatgtgttgctgctgctcaagaatacagtaatgaaactaataagaatgcattaccatctattgttaagggtgctaacattgccggtttcgtcaaggttgctgacgctatgtacgatcaaggtgatgttttctaaattagatagataaatagatccacaaacaatcaatcgaaaaaatagattttgctttgtttttttttctccattactaacactattattaatactattctttctttttttcatcgtatttcttcatttttttttattcaaatttaagaataatacttaacatggggtatatagtatctttttatagatatgtattattatatgggtatgcaacgaattcaaatctaataattattagtacttaatgattttttttctcccctttttttgaagagtctttataactttgtatttgtgcaagggtgctgctgccttgtatttttattatacttctgagtggtacatttttatatttatctttgtttgatcttttgttattatttttatttaaaaatcaaaaaagtaaagtctgcatcacaaaaaaaaaaaaaagaaaatttcactgaaagagcgatgagatgaaatattattttgattatttttttgtcaaacataaaataaagcatatgtttagatagaatatacgtagaactactaaaggtgtacgtgtgtttagaatcctgtctcaactaagtaaatgggtagtgtccataattaattggtctaacattacctgttctggttatatattattttatttttcttttagtattattttgtttttttcgtttacacattttctcacaagtgataagtaaaagcttattagaatatggctaaaaagataggtaagaattcaagagctgcaagacaggcagctggcttatatgatgatccagaagtagaaagcttaaaagatttacctcgtgctcagaaaactgatctaagtaatattatgattagaacagcagctaaaaatgaagcattattggacgcaaggataaaaaagaaaaggaatgataagaaaaaaattggcaaaaaaaatttagaagacaaattatcaaaatctgtcactcatatggataaagaaagattgactcgtgcgttaaacatttctaataaactggatggcaaaatatctaaagctattgctcgtgctaaatatgttcaaagttccagaaaagctggttgggatactactaatgagatcattaaaagagaacttcagttagttagtggtggatataataataaaaatcagaagaagaaacacactgttaatggtgaagaagtaacggaagacaatgaaattgaaaataaagaaatcgaggaatcaattctagaagaagattctgagagtaaacaaaataaggagaaaacctcaacaaatattttttccttacttgaaaatggagtagaacaatagataatagtttgagggtctgttattgttattgttgtttatattatcgaattagcttaggacgaatttctttcatgcgattatttggtatttatgattttcagatatttataagtgtataaatggatttatgtattttataactatatgtacaatagtgaattcaaaagtaataatagatatattctgtttaattataagaatattgttaaggatactcaatattagcattgtatagctcattatttttttctgacaatatctagtaacatcctatttcatgattatttcatgattctgtagtaaaatctaaagtttgttcagcaaattcatttatgaaaaatttacacatattttttatgtttctccacttaaatttataaaaactatagaaagttattatacaagttatacactacttcttttcctttttataccaaccaacacaaggttaatcgatttctcaataaattacttgaagcatgtctcttatagtttaccttttctcgaacacctacacacactaaccactcctatctgtttctctacttacgtccttatcgtatagggcaacccgcctcaaagatctactcatactatttcttttcttttctttttttccttctcgacaaaccattactaatagtttatgcaaaaaataaaagaactaaaaaaaagaaatccagaaacatgactacaagatgaacaatacaaactaataatataaaaatggcttgaatcttgaagacattggctacgaaatgaagaccaatcattgtttttacttttccttaaatatattggatgttatactaacacattggtgaactttcctttttgttttaagttaaatatatcataaaccgtcaaaaaaaaaaaacgagtgagaagaagggtaataataaaattattattattattttattatcgtattttattctacttccctcaacctatataaatataccactattattaccagtatcctctatcatatgcattgtgtgcaggaaagatggacataaatgtatcccttttaacgatgccacagaccgaaccatttcaagaacctcaactaaaatcagaagaagataaagaacttaatgatcattcaccagatccttcatttgagacctctaaatacaaatcaataccatatttttcaaactattaccccataatagatacaagagaacaatacaaaagaaatattaataatctctacgctcaaacgaactattttaataatacatccctacttgaaaaagatgatgtattattttccaagaaacatcattcaacaggttctagtaaaagaactgaatatctattaaaaaaatattatgaaacaaagagaagcacgtttgataatagttttagtggttctgatcataatagtagtctccaccaaacacatgatgattcagtagtagatggtatttctaatagtaataataaagttgataataatactagccataataatagtgccagcaatatcataaataaacctgatctccagaatctgcaaaaggaacgaaatatgtctcttttatatgtagatgaatttttgaaaagttctccggatgaattatgcaacagttttattgatagcaaatttaatccaatatctaatccttttatgatttcaacagatccaatacaattggacaatcagattccctgtaatataaaatcaatatcctcgtatcttaaatatatggaacaactacgcacagtaatggatactgataataatgaaatcaataaacgaagactatgggttccaatgcataataaaaatgttcaggaaaatgttatagaaccaaaaatagtagattcaaagattatcccgtgtccttcttccaaaccatttatttctatggattttaataatattccaaaatatgaaaatactactattataaactcctcaactcttactggagaaaactatattgtaaatttatatggcccccattctggaataatgtcatcaccatcaatatatgcagagaataaattaccatcatttatttatcactgttctgtagccataaatgacgaaatttttatctttggtggtcttgtaccatcatatagatacaatgaggaggcaccaaatttaaatgattttgacgttgatggaattaaatatttaccacccccattattagatgaaatactgaataatccatgcatgatagcaaatccttttgtatatattgtcacaaccactacaaaccatgttagaagagctccattattgggacaactaccacctaaccttatatgtgcaacagctaccgtgctaaatgagagatatatttttttatttggtggtattgaagtgaaaacaaagacaaatttcaatcctataatgggaaagtattctatcgaaaaaaaagcatttgtaaataatattggttatatctttgatacaaaaacttcttatttcactaagattgaaattttattagacggagactcaagtagcctaggtactatcacaaattttgcgccaagatttggccatgcccaagtatcaattgattttaatgattcttgcaatttttcaatcaatagtagtttatccagttcatatgaaaatggtaatggagacgagactttaagatcatcaccttcaagtcaccatcaaataagttcaatccttatttttggtggttacacacaaattggccacaaggagtgcgtagctacgaatgacttatggagaatcgatatacctataaccatgcttaataaaagggatccaatcaaatttgagactactgctacagcacacttaattatggatgaaaataaaagtggtaacatgaaacttccaccaaaaagggcattcatgggttattctttaatgaatagagtaccatattctaataatattaacgttgaaagatccacgtttatgaatttagcaaatgtcttgaaaacggttggtatcaaggaaagacatgatgaagatggtagtcttattaaaattaaccgagattgtgatttattagaagggttagaatcaactttcagtgaaagtactaaccagagaaaaaataaaaaaataacacaacaagcatcttttggcaataatgaagaccatatccagacaaatgaaaattacatgaagtcaaatgagagtaatttcttgtttaataactggttccataaaaattcggatgattccaacgcatgtaaaacatttttgattcatggtggttcaaataatactaatatatatagtgacctatggtggtttaattttgattcttatagatgggaaaatatagatttatatgggaaaactacgtgtagtaatgatcaagatagttcttttgtaccaattaaattaggacttgttggacactcactaagtgttaattgtggaatattatctctagatggtggattaaatgaaaatgatgttgatatattatataacaataaaagtatagaattaaatcccaaaatttccctatatgatgataccataaaactagataatctatcgagcaagtgttttgatttgagcacacaatgtttgtttgatagaaaaattgtgcattactgtgatgatgacttggagtccaattcaattacagtaaacgttgtctcaccttttgatcattatatgccaacatttttcggcactaatggtgtttatgctaacggaaaattagttattattggtggtatttattgtaaaaggaagaaaataaaaaatttgtatcttagaggcacaatgctttacgctattcctatgagatacgatccatcttaaaacatttttaattacttataattttcacacatgtacactgcatatatggatattaacaaaagtatttctcttgtaataaagtctcccgaaatcttataacttagaactattaatcctaataatattgggatgtcaataatatttaacattgtaaaagaattattaataaacaaaaagtatcatcattattatgtaaatacataaagcactaagaatataaaaatatttttgcctaaaaagtgtaatatcaagattaacatgcaaatgaaataaattccattagcaataacctgttatgaatgtcagacaaaagagaaaacggtaatcatccaaacaggcaagcataatgggaagaatgattaatttgaaaaattacaacaaatcatctatgagatatttacattttcaaatatgtttgcttcactttaggtccacttataatttcactgaattaagtaagtgttgaaccacttctggatttgagagagttgtaacatcacctaattggtcagcctcacctgccaaaatctttcttagaatgcgtctcatgattttaccagatctggtctttggtaaatcatccaccaatacaattaatttgggtgcagcaaatggaccaatatcctttcttacagtcaagatcaaatgttttttaatatcttgtaattcttcttcagaagcatttgacacggtagatttattctttaaaacaacaaaggcagcgactgcctggcctgttaagtcatcattaaacccaacaacagcagtttcagcgaccatatcatcttcaattaatgcagcctcaatttcagcagtagatagtctatgaccagagacattaaccacatcatcaacacgacccaagatccaaatataaccatctttatctcttgcagcaccatcacctgtaaaatagtaacctggataaggcttcaagtaggtgtctaaatatctgtcatggttcttccaaatagttcttgcaaacgacggccaagctcttttaatggcaagaacaccttctgcatgtttatcattaatttcttctccagtagttggatccaagataacaggttcaatgccaataaacgggaaggaagcagaacctggtttcattggtgtgacaccaccggccaacggagtaatcaagtgagaaccggattcagtttgccagtaagtatccacaattggaatttcatttttaccgatctgttcagagtaccattcccacacttctgctgctataggttctccaacagaacctaagacacgtaaagactttaacgaatagccctcaataaactggttaccagcacgtttcaataatcttaatgcagtaggggctacataaaattgagtaactttgaatttatcaataatatcccaataacgggagtaatttggatatgctggggtaccctcaaagaccacagtggtacaaccagtcagtaaaggtccataaaccacataagtgtggcctgtgatccagccgatatcaccagcagtaaagaagatatcttctttatgaacatcaaaagtgtatttcatagtcaatatagcactaatcaagtaacctgcagtggaatgctgcaccccctttggggtaccagtggaaccggaagtgtaaagtaagaacaaagggtgttctgaatctacgggttcacatggataataagttttatatttgattgtttcttcgggccaaatcaaatctctacctggagtatacgatacattggggttattagttcttttaaagataaggacgtttttaacaaaatccaaattttggattgcatcatctacgatttttttagtctcaacgatcttaccaccacgtacagattcatctgtggtgacgatgaatttactgttagcgtccaggattctatcctttaaagagttagaagagaaaccggcgaagataactgaatggattgccccaattctaacgatagctaagagagtgatcaaagcctgtgggatcattggcatgtaaactgcgacggtatcaccctttgagacacccatagagaattttaagacctgcgccacttgggagacttgttcgagcagttgtttataggtcaattggatagatggtttgcttgggtcatctggttcatagatgatggccactttgtttggtgttaagaaggcatgtctatcgacacagttataacaggtatttagctgaccattgatgaaccaggcgttattttcaaacgatggcaacccagtagatgggtctgggatgaaagtttggtcaaacagtctaaaccaatgcagttcatttttcgctaaatctccgaaataattcgatggatcgtttaaggacaggtcataagcagtcttataatcatcgaaggtgccattggggcctagattaggattataactctggattgtgattctatctttgatagatttttgtgggatgattttaacattagttaaatgttcgtactcgtagtgtttagatagttctttttctttggaagagagtttagctttagtggtattgatggtggcattaataattgattctgtgttatttgaggtggccacagaagacatgttttcctatttctatttcaatctttgtttttttttttttttttttttttttttctttctaaaacaacaacaataataaataaaaaaaaaaaaaaaagaagaaaaaaagataaacgtttcaatgagcaataaggagttgataatcatcgagtattctttgaaagtataatcatttatatataaattaaagttatatttaataaaaggtgaataagaaaaaaaaaaaaaagagaagaagaagaaaaaattaattacaaagtgtcatctactgaattcgttgcatgaatctccaacatttggaagcaaggaagaaaatgagcatgtgaagcaaagagtaaatatcattaaaaagagatgaattggacaaggataaggaacctcttcttcatcattggatattgatatttttcacaaccattcaagaccgtgaatatagcatgactcaactttactatagtcataataataattgtgatgatgatgatatgtccaacatgcacatacacatagttgttctatataaaacatactcttttctttttctttcctttccttcccttttatttttgttgttgttttttttgtttatttgttctaccccaacacagtgtcagtgctactattaccaacagaagtattattaacattagcaataccagcagcaacggcgatgccaacgacgacaacaacagcaacaacagcaacaacacatgtcgacggtaaattagggttagacaaacagtcgcactgtttttccagaaaccttttttgacctcacggctttaatcgcctgttttggaaaacagcacgggaaaatttgatcactccaagagagaaagaaccctataaaaaaaaaatacacacgttagagatccctgggtgtacaatacgctttgagggaactactacaacacactcgactctaaccctaaccctaaccctactattttccaacctctcaagaaagacaaaaaaggagaagagaaaacaataacggccttgcaaacattgtcctttccccctccctctcctctctctctttgtgtgtttttggcttactagaaaaaaaaaacataaaacaaaaaagaggggagagagtagcggcggaaaacaatacgtgccacacgcaaaaacacagaatggcaaactccgagggaaacagaaaagtacaatacaacaaaaagaaaagaaacaagaaacctgcgcccctaaatcttcaacagtagcccccccattatctatgtgtatatatctatataaatataagtatgtatatatatatatgtgtgtgtatgacgtgtaccattggggaaagccaaaaagaaaaaaaaaaaaatttttaacaacaataaagaactaaaaaagcacatgttcgtagcgaaatgaacatttttctctctttgtggtgtatcaaaacagccgatttgtctatgacaattgagaattgacagtgtggctaacatcactacaatcattttctctctcttaccatatatatatatatatacagacaagtagatgtgcgtacgtgtatgtgtgtgcgtcagttttgttctggtgtttatatcatccaacacgaacggtgtaagtttttatgtgggtggggggcgcgtcaatgtctttttcttttttcttttttcttttttctttttttctttctttttgcgtctctccgtctccacagcaccagcagttcaaacaacgaaatgagactgaggaaaaaataaaaaataaaaattttcatcttacggaggaaaacaaggcttgtaaaatttgaaaaaaaataagaagaaataagtttctttctctctctccttttcaaccttgcaagtagtacgcaactagctaaatagactgctcccactgcctgttatcccgctatctcgtcatcgctaccgcattattaaggagtagtcttccttctaactattattattgctgttgtcgttgttgttattattattatcatcatcatcatcatcatcttgatatctattctatttttagcttggcacagtttccttctttatccatttacttttcttcttacctttacattagaaataccactattatacattcatacatatatacatatatatatatatatcttttttattaatcattgttatcattacgttatcttacctactcattcctctcgctgtccctccttcttcgtcactctatacttatccatcgatatatatacatacatattcatctatttattgaaggaagttttatcttattaggatattgacacttatttatatgatattacattacattaaacattaacatcaaaatctcgttttttgtttttgttccattttttcttttctttcattctttcatttctgcttatttgatttgttaatatttaataagactattccatatcaactaattatttattcatttcacaaatatcatatcatacaatacaatacaatacaatacaattctgttttataatcatatcaacaattactaatttatagatatagttttttttttgtttgtttgtttgttcttttttaactttcctgcccccttccccattcatttcatatcatttcaaatttgcttcatcttacttatattcaaaattcttttaaagaataaaaaaactaaaataaaaaataaataatcaattaataattttttaatcaatatgaaattttcactgtcaaacaatcacatgaataactgtaataaaaaatatatctataattggttttatttaatatttttcaccctattctttctaatttctaatattcaattatcattagcacaagatattgcaataacaacaacaacatcatcatcatcatcatcatcatcatcatctactgctgccgctactgctagtaccacttcactctcatcgtccaccacatcaacttcttcttcaacttcctcctcaacttctaaaaattctaaaactactaaatactcgaatagagtactaaaaacctcttctttactaacatgtatggacaactcccaattcaccgcacagtacttcgatgttagatattatccagacaataaaaccgtggtattcaaagtcgacgcaacaactaccatagacgctaaaattattatcgatgctgaggtcatcgcatatggtctacaagttttaaacatgactattaatccatgttcgctaggccaacttggtatctgtcctttatccccaggtagaatcgatgtagaatcaacatacgtggtagattcagatgcaaccaatcaaatcccttcaatagcgtacaccatccccgatctagacgctcaagttagagtcattgcctattccgtggacgatgtcactaaatctaacccgttagcttgtgtacaagcaatcctaagtaatggaaaaaccgtacaaactaagtatgcatcatggccaatagcagctatctcgggggtaggtatcttaacgtcgggttttgtctcagtcattggctatagttccactgcaactcatatagcgtccaattccatctctctgttcatttatttccaaaaccttgcaatcactgccatgatgggtgtctcaagggttccaccaattgctgcagcttggacccaaaatttccaatggtccatgggtataatatacgctaaattcatgcaaaacattttcaattggtatgttcaatcaaccaatggtatatccacagtcgttatatcaaacaaagatattctttccatatctgtacaaaagaaaaggaagagaggttactctgtagtctcatcgagtgactataactttgatgcactcaccgacgattcaagtctatatactaccaatgaaagaaacagtgataactattcaacaaagatcctggtgttgaggggtatccaacgtgttgcatatttggctaacatcgagttatcgaatctgtttttaactgggatagtaatatttttgtttttcttattcgttgttgtcgtatctttgatctttttcaaatctttattggaagtcttgactagagcaagattaatgccacaaacttctaatttcttccaatataggaaaaattggggccaaatcattaaaggtacgttatacaggctatcaatcattgcgttcccacagatttgtcttttaacaatctgggaatttactcaattggattcacctgctgtggtggttgatgcagtgataattttaatcatttgcatgggattactcatctacggtacgactagagtgctgttgaagggagtagaatcaaagagactctacaagacacctgcatatttattatatggtgatactacctttttgaataaatttgggtttttatatgtacaatttaaggctgatacattttggtggttacttgtactgttgtgctattcctttttaagatcattatttgtggctgtattacaggagaatgggaaagcgcaagcaatgatcatattcatcattgaattgttctacttcattgcattatgctggattaaaccatatttagataaaagaacaaacattttcaatattgcgatccatttagtaaatttaattaacgcatttttctttttattcttcagcaatatatttaatcaagcccctatagtgtcctccgtgatggcaattattttgtttattttaaatgcagtatttgcattatttttattaattttcaccgttatcacgtgtgcattagcattggttcatagaaaccctgatataagatatcaaccaatgaaggatgatcgtgtatcatttattcctaagatgacaaatggagatggaatgatcgattataaaaataacaaatccgaagcagaattatttgaattgagacaagctgtccttgatacaaatgagacagagaaagagaaagagttaagagatgatgcttttacaaagaagaatcaatatgaaactaatagtaacacgtttgattacgattttgataatgatagcggtagcgtgttcaattcaaataatatgagatcatcagaggaatttgtacagccattctccaccataaacaacaataacaatactactactactaataataataataattaccttagtgtatccaatagatctgcatcatatgcaggcagttcgatgtcgaatctattaaaaactggatcaaggtcgcctgtaaagaatagcagtaacaatgtagaaaatttaaagaaaccagaaacaactttttacggtaataatcattcatattctagggactttttgtaaaatttaaatagttgtatatatttgtgtgtgcgtgcccgtatgtatttattaaatatcacacttcaagcaactaaactttagtattttatatgcatgattacatatcagaagggcttgttcccaaacataatactaccattctaatccatcaatatcacaccgaaacaacatcaattatataaaatatgaactatgataatcctaagttactttataatcttatttccaataatttctaaaaatgcgcttctttagcggagattgcaccaaaattacttaatcaggtaataaaattactgtgacaaagagcataatcttcaattttttttttgtatttagattattttttgattttgaaaatataaagaaaataaaagaaaataaaaatatttgcagttcaaggtgaaactagagaataatagtgctgagataaggtatttgaagtattactccaattctaaagtagctgaaacgaaatggaatagataatcaatatatatatatatatatatatatttgcataaagaatgatagttattaaatctgagggtactccaaaccagaaaccacaatcaacaaatacttcgaataatgattctatgacaaaatccttttctaaagcacttaatagtgacaatactaatatggataatgcagctaataagcagatacaagacactgtcaataatgagaataatgttgtcagcaacgtgacaacaacagtttgcacagatccagatcagaaaataacaaaaccaatggcaaaaaaacagattagaaataggttgtcatttgtttgtcaagcatgtagaaaatcaaagaccaaatgtgatagagaaaaacctaaatgtacaagatgtgtcaaaatgaacattgaatgtgtctatgatgtagccaaacaacccagaccaaggatcccaaataaagacgccactattgctaagttagaaaaagatgtattgtattggcaaaataaagcgatgaaacttttaaatcaacaagaagaaatattgcactcgttaaaagatacacatatttcgaataataacaataacagcattttaagtcataatcctactactaccaataataataattccaatgtaaatgctcccaacactttacctttcatacagatggccaaaaatgtcaataataatgatgatgattatttaaaagatatagaaataaacttatacaaagaccatccaacaatgatacttagcaaagtgttgaaacatgatgttaaaccattatcagaaaattacattatcattcaagacagatttatggcttgttgtatagcatctgcatttatgtcgcaaaattctaactctatgattccagcattaactgcaaatgcaaacatatctagagctaaggaaagtgttaggaataatgttgcaaaattgaaaaatattctcatgaagcagtgtacagaccctgcaagaagagccagaattgaagaatttaccgatagaatcctagaaaatacaaattcctctaaaagtttgaagattggaatgatcctttctatgttatataacactgtgggtcatcaatatttggaagattactgtacatcaagcgacaactattctgaccttttaaaattatttatccaggaatttgagaggttattaccaccgtatgaaatcattcaaagttacaaaaaacatttctatcaatatgtttaccctaatttgccttttttacagaaggaaatttttgaggaatcaatatctcaaactataacccgtaatcctgatgacccttccaagatcaagttaaatttaggatgtaatcatttgagagacaaaattgaaaatttatcaattttaatggtaattttgaagttgtcttatgtttctttgagagcaatcataaactatgacgaaaaagatgattctggtaaaaatgttacgggtaataaagatttgtcatcatctatgcctatatttgtaacacaggagcaaattaataaatatccaatatcaaatgattttatattaatagcgcaaaggtgtttagcgtcagaaaattggtttgcctgtgctaacgaaaatatcattacatgcttattatttatttggtctttttttgcattttctccagaagaaggtgattttttcttagagcatccaacagatataattagcagtctaatcatgatgctctctacctcaatagggttacatagagacccgagtgattatgctcaactaaaagagccctctttatcagatcaaagattgctaaatcagagaagacttttatgggtctcagtagtaggcatttgctcctttgaatccactttgaaaggcagacatcctctactttcttcagacctcatgtcgtcgtttctcgatacaaaggccactaatagtattaagcattacatggagagagtatcattagatatgacaggtaatgaagatgagcttttaattaaaattcatgagtggactgttaagagggcacagttatcattattacttgctgatttggacagtattactatgtattataatgatacattttctttacggtatctagagctttctagggaaaaaattgaaatatttgtagcagaaaattttccattactggagttagaaaagagaaagactaaaaataataagaaaaatacagaggattttaatccacattcaattttaatagctaatagaaattccaatgcactacagagtattttaatatcaaaattaatgtttctaagaacatcagctgccatatatcttcattttgaggtaaaaagtctagaagactcttctttactaccatattattacaaatacttaatacaaacagctagtgactgtctaaacttaattaaagtcatcaacgatttttttagtgatgaataccacgattacatatataaatctaattcatttaacatcactaaaataatacaattagcattgcctactgcattgttcactttaattggtgtcattataagattaactctaacaaataataatattttcaatgattttcaaactaatattaataattatacttttcaccagaaagcagaattaaacatgagatttgaacatacaacatttattcaaagagagttagaaaatacactagagtgggtgtatgcctttgcttcaaagaatctcagatttacatatttttctattttcaagttatttgcagtaggcgatgttgtgttacaaagaatacgaaatggtgaaatatggcaaggtatctgtaaactttctaagttgaagggtctacaaactaaaataactaaaaatttaagaatgacattaggtgttaatatagagcaaggtgcagatttaatacatgatttagagagaagaaattttattgaaaaaatgcctgtgagggaattagctaagttatgtaaaataattcatgatatacatttaaccataaaaaaacccttaccagtatttggggaagaccaaaaattatatgctccaccttctgttcaattaactttagaaggtcaatatctccgcccttccctcggttctactagtgcaagcgtgccaactactactgcgtattataattatgctaatattccatataatcaattttcaattacatctcttccagtaaataacaaaaacatgcattcacagtatccctataatagtcaggcctcaacgtttacaagtaactcaaatcaatatcatattgatccacaaatacagtcagttatgttagtgaaccataatagcccacatatgttaaattcaatgactcctgtaccggaaaataacaatgtcaagtctttttcaggagcagtgaatcataacaacttttctccttctataataaatggacatttacctccactaaatgcacctattccttcttcagcgatgaatatcaataaaaacattcccaattttacgacattttcccatgaatataatactactaatttcagcaattcaccttataataatcctaatatttctggtggccagcttcaaaaaaacactaatatatctaatttaattgttagcaataatggaattcaaaatggcaatgattcgagtaaatatagtggattctctattaatgaaaatatggccaaagaatttttggaacgaacaaagccttctagtgaagcatatcaagatgaattttttgacggttttgatctctttgattatgactttttatttggtaatgatttctcttgattatattagacagtatattttgactttttatctgtagtctatttgtgctgggtcataagtctgcaatcatttttgtcataaatagaggactgtactatatgataattttatatataattatgttatctatgataaaaaaaatcaattaattggttggaaattttcaataataaatcacgaatattaaaaatcttatgttattaacaatttacaaatgagaataaacatcttgtttacttctgatctaacttgtttttggccaatttatacaaagtatatgacagcaaagttatgaaacccattgaagatcctaaaatgacagcagtttgtcgataatctatatcagtgattgttttcttgactttttctggtaaatccggggtgttgtcctctggcactagtgcagcttcagtgattttaataaatagctcatttaaggaacttaaccatttagaagatatgtgtaatggatgatttagaaacattttttcacaaaaatcatcaggttgcgtataacacctttgctgttgcttatctaaatcggctttgagtccaacaataatgataggtagacgtttaatatcttcatatctgttaaataattccaaaatgtatgaaaatgaatcaggatcacttgaatcataggttaggcataatacgtcacaagttttcaatttttccttatttaaaattaattcttcattggtctcaataaattcttgcaaaatcaaatagtactgcttcccacctttaagttctaaactattaactgcaatatgaggcattatcatcggctcatagttatctgaaaattgtcttcctaaaaacatctctaacaaagttgtcttaccactgaatttttttccaaagacaaaacagttaaatactttacgatctgaaactgatgatctatatattttcccctgtcttcttctatgttttcttgcttttgtaatttgtaatgctaatctagtatcttcttcaaaaccaaaataaaccaaatattcagtgacaactgtatagtctaagtatgttgtcatcgcccattgcgctaaccaaccttgtaaagtgataaatcctctattatttatcacagtagaataaggaaaattcgaggccaaccataacttaggtaaacctggtgtagttttgaacatagcttcaagctcattatcatctaatccaccatctttatttctgtcaaatttaacaaataggcttactagaaatctatatcccttaggactcaattcgacgctagctgaatttggtacactaaccttagggtgaagataagtatcatctagtgataaagaattagtatatttaaaagctcttaatataccccaaattgtttcatgtctccccttttcaacatacatcttattcaatgccaaaaaccccttaatagtaataccagctcctggcacataaagaggatagtgaatatcaccaaaataggaatcttcacttttggtcgtagagtcatgaaaattgttatagttgctgactgatgcatactcgagttcttcatgataactatttctttgagtgattaaaagattttgttttatgtattccaattcactaatagcaatttctttacggaaacattttctttgtaaataattcatctcatcatcatttaaaaatccatcttgatcattatcacataagagaaagattctttgtaaagcccctattgctaaaggtttcaagtctccgcatcttgcatcaaataaaggtgtaattggataaatgatagccctttgacataaataaaatgcttgattgacattgtatttagtctttgcagatgctttgatacatgtgtctatttctttaaattccattaaaatagggataaattcttcatcttcaacttttgtatcttgaatattaccgttgttttcacgagtttgatttgttattgtagtaactgttctgttcacagtctcatttacattagcatcattactgattggagtatcacatttatttttacataatataataggtatattgagccctaaagacctaaacatcatcatccaatggaaggatatcctttcgtaagagtcatggtctgaatatacaagccagataacatctgccaattttaaagtagtgtgtaaagcttgtatatcttcattgttcgtatcaattataaccgtactaaacgaagaatttgcatttgatgagaaatctcgaggtattgtaatgggacttattacatcttgtaaattcgatacaaatttattttttattaagcttactaacaaacttgttttacccacattatcatcaccacaaaccacaattttgattgtctcttttgtcattacttaaagctctagtactcttatcccaatgcttacttaattgtagggaaggcaagttgaggaattcttttgatgtataagctgtttgtatttgaaattgtaaagtgcctcttgaactttgccggaaattccaattccccaaaaaatcatgtgggcatattttattgcggaattgctacggaatgtagtgtttccaaatgtgtttttgaaatccgtgtggaatccttgcaaaatccgaaatttgtagtcgaagatttacaagaatctgatcgatgtgattggattattgaaacatggtgagatctatggttataataaaaatgtgttattccattaaaagtgatcttcttcctaattacaaatttatctgaatcctgtatcgttaggcaatagaaaaagagatgatacatctgaaaaaagtcatgttttatagatatatctatcattatattatctttctctttttttggaattgctgaatttcaaatgaatatttataaataaacggtttacaacctataaactatcataatccactgtaataaatattaatattttaaccaaatgttaaaagtaaatagttaaaagagatcaaaagctcagtaaaaagttataaaagacttgtatttcaatacttgattcgttgggatatttgtaattgttgtttcaacttttcattttctatttccaatttattaatacgttgttctgtgatatttgactcaatctttctagattctctttctattgaccaacgtttctctaattctttaattcttagtttatactcctgctctgaacctgtaggtgatggtaaaggagaatataattgatctaagttatttgaaatgattgatgaagaaagcattggactattaataatgaatgatgtatacgatttagttaaaaaacttaaagctttttcattgaaccttaataatgactctatctttacttgtaattgctttattttatctaatccgttttcaggatctcttacaaatgaaatcttcctaaatgatctttctattgactccttttctagaactggttctaatatatcaattatttttgataagtagttgaccaaagtttgtttgaatgcagaaaaatgaagatttttactatcattgaatactgatgcatcatgttttagctgataaaagtccttttgtaatagttcgtacctatttaaaattgaatctctttccttagttatttgggtaatcaatctcaaatgatctctctcaacagtcttataacgcaattctaagttctttaacatattaggatattttttattgacatcattcattgtttctcttaatttatttctatttatttctgactgtttatcaaatttatatgttaaagtgtcgattgattttttaattgtgttaatatcatcaattttgacattttctttgagatccttttcttgcttctttattacagaagataattgggctaaacatctatcttgttcagagatcttggacattaacttaccatataaagttaacgattttcttaatttttctcttacagttaccatatatgcatcatattgtctatgtaattcttcgattattgaagcagtgtcggggtctaattttatttgagtgtctgcattttctttttcattatcagttgttgatgttacttgttgtttaatgttgagattttcactcatattgttagcctcatcctctaaatgttcagtagaatcatcaatagggataatattccgctgttggaattctggtgatgtaattatctcaagccaatatttttgaaattgcaaaagcttattcataacaaacgaagattcttgctgcaaagtgccttccaagcttggaattatatcataaaatcgatctgaatcagaatcttttttcatagcaacaattaaatcctctaacatcgaattaataatcacagacatacgttcgtagtcctttagatgctcatccgtcatttgtaaagtgtcattatattctttcttcagatcttttaactcgttttgggtctcttttaattccattctcaatttctgattctctttttctactttattaatttcatcaggataatggttattcatattattttggctatcattgctgttatcctggatagatgtagaaatattattgattttattgaataaactgtcaaataacgaattattgagttcaccaatgtttgacttgttggaacctgcttcgttaatacctttgattatttcttctaaagcagatattttaattttatatttttttaattgattttgtagtccttctaattcattaggagtaatcaacgatttaaactgaattggtcgcgtatcaaatgtcataggatctgaagcaggtttaatcaagttatggtccatggaatgaggtgaataagaatctgaattgacatcttggtttttccaaggtgtcatgctttcatcgatttgagggattgattctttttttaattcactggcatcaatattttctgaattatcttcatctagtgaacgagtactgttcccataacttttgacctcttgaatctcttctagatagatagcattgcttggttcaactattttggttttgtttgatggactgtcattattacatacggatgtatttgcagactgtttattaggtgtggaagctgtaagtgggattttattcaactgagacgggctcattaaatttaaatcactgtggttaatactatgtctctcgtccttgaaatcacatgttttgttttgtttaatatcctctattttatttatcggactgttaatgatctcgctatggagtgattcttgtgatacatctttgttaatatccaatattgattccatttgaaccatttgcaaatgatacaatagtaaaattactttggctaactattctactctaatatccagctgctctattacaatcaaatgtatttgagcatatcctgtgtatgtatatttatgaatatgtgcataaatcaaagatggttcgatgtataacaaattatttttaaatgaaataaacccttgtaattatgaagaaaattaaataaacaagcaaacctttaatgctcgcttacattgagacagaataagataaaaagctagcacatatggttagtagatattgataccatacagtagagtttaataaggtattttggaaaaagccaagaagaaattacgaaaagaagggcaaagtgttaaacaaatccaaatatttaattagagttttaacctaccaatgatatatattgttaaaaaaagaagttatatcccactaggatatcgacagattctctatttacatgattttgaccctatatgtaatccatatatatagatataaatgtataaagaaaagaagggaaagagtgagagaggaatatcatcgttaattttttggtttttttactttttttgtaatcaattgaataccatgccattttgcaatatcttcttttaagaactcatttaccatttggtgctgcttaaaaataggtaaattgtcaaacttctcggaggtaatatgaatagaatacatggatccgcatccaccagaaatatcatttacagatagcgatactgggtgatattcttctaataactttttgaagatagtttcctcttctgtagtgagaaagctttggtcttcaagcaactttatttgatcctgcgataatctatgagtctccttgttttgttgttgcatccattggtaactttgttgcgcgtataatctatctgaaattgctatagaccctctgacatatcgtaaagccgaaatatttacattaatatcatgcaaaccaactttccttcccagtaaggtggaggatctataattgaccatacttctgagcattttatgttaatatatgttattcaataacttaatagactacctgtcggaatcaatacgttgtaataaagttgtgtagattgaatttattcttcacgattatgcttcttgtcttttaattgactccgctttaaatgagctaatttatacacatgtatcatcctgcacaaccatagataaatgatagtaagtagtggtataaagggttagggtgcagaagacttacttttcaaacgcttttggcttcttcaactgcacattatttgttttgatatatgttatagtgactataccaaagtacatgacagcgaacaaccaaaattgaaaataggtaaaaataaaaataaaaataaaaataaaaataaaaataaaaataagaggtagaagcataaaacagaaaatgcaattttgacgtgaagaattgctgtgttgtagggctgagctgttggtaaaagaatagcatatttcttaaccttatagcacttgtaaaagttagacatatctttattatagtgtgtgtgttgccattgataattcacaaaagtttaccgaacactatagatcagttagtttcttttagaaaggatttttagattattcagtgatgatatattcattttggatttttgataaacattgcaactgtatatttgaaagagaatggactctaggtagtaacacaaataatcccaatgctctgagtagtggcactataaactcaaaacaaaatgatgagatagggaagttattatatgggatgatattttctttgaactcaattactcaaaaactatcaacctcaatatctgacaatcaaataaacaataatattagatccatatctactggtaaatttagaattcatacgatgcaaacagctactggtctttggtttattttgataacagattttaaacaacaaaactattcacaagtattacattacatctatagtcatatttatattaaacatgtggttcataattttctttcgccatatgattttgcattgaatccaaaagaacaacgaggtcaaggcgttaaaaagattaataatagacattttatcaacactttagaggcattcttgcaaccaatgttgaattaaattatcttattgataaatataaataaatttatatgtatttagagaaggagatggttatatgggtggataagcattttcaaagataaaggtacacttttttctctttccttgttatcttatctttttacatactatttaggaaagttttacagaaacaacataacagcatgaagatgtaatgatattcggtaaatatttaccgaatatcattacaatatatatatgtttattttatccatagtgaatatttatatttaatataattacataccactgaaaagtaaatctgtccagaattcatcgtttaaggcgtcataacctaatgctaaagaattcatatcagtcaaatattcattcaaattatcacttgcaattgatggtgaagaatctttaagtagtggtaattgatcatttatcatattagttttattagtggctcctgataaaggatttaactgaaatgggaatccatttttatttttttcaatgggaaattctttattattggagacagtagagttttgcttagaatctaaatatacatttaaacgtgcatcaccatttagagcactattattattatgatttgataactccactttaatagtattgttttcattgtttaatttaggtacaaaattagcattattaacagtgttgatctgattattaatagtatttaaattcataggattcaaatacaattgacgtgagttgacatcttcactatacatcaattgtgtattaaattgaatattcttattcatttttgcgtgctgttcgttatgctccattctttctgctaattctgtaactcttgttgcatatgtttgaccaaataaggctatcacatattgaaatttatataacccattgttataagggtattttctggatgcgctttccaaactggttgatacttgttttactagatctatagtaccatcagtaatggtagcaaaatggtgaaaagaaggtattgacacagcagcatatcgtaattttaatattaatacccctacaatgtaaataattcttgacatatgaaaaagaggtaaagatgctattaaagtgtctgacaattttaaaaattccattaaagatttagtacagcattcataacaccttaaaaatgcttttgttacattatctgggagatctgcatttttttctattgcttcaaagtgtatataatcatttaatgtgaattggtgtaagtatgcttccacagaatagtaaaacgctaacacacgaggacgagaatttggaattcctttgaaaacttcatctaattccttttggtatatatcaattaacccctgaatgtattgttcagctaatttataatttgacaatgcttcatcgtattttatatctttgatttcatgtaaatgaatatgtatcttttctaataaatgatttaatttagaaaaagttattaatgtttcacatccctctatttgaagacttaaagatgttgtattatcgtttgtgttcttacttgcttcaagacaagcttttaaatcgtctatgttttgctttatatcttcaattgcattctctgtaataaaactccatcgtacatgtattgtttgtttcaagtaaatcgaaatattcagggcagatatatatactaataatgtcagtcttgggccattttcagcttgttctaatagacttctccttggtgcttgacttttatttggggcctcatcattaaacattccaaatactcgattaacagaagcgggactcagatcttttagaaagcaacaacaaatatagttgaataagtggtatcgtgttttgttagaccattcaagaaaattataccacatgcataatgttactaatgcctcgataacttcaattgatttattattcaacttaaatatttgaatagttatcaaattaataacaaaactatctaacttcattacagtgtcacgtgttgtttgttcttctgtcataacttttgaaacaatagacataaccacagagaaaaatattggtttatccttacgaatatcattaatggaggcgtcatcccgtatacaaacaaaaggtaatctgctttcacgggcaattacctctgagtatagttttaatcttaattcagcttcttccatggatataatcccaagataaacaggatccgaaatagttggcaaaaataaactattttcaactaacttattccattgtgtagaccacaagttaaatttattgaaaatcccactgactttcccctttagcaatattaataatgaccgtaggtttcttttaaattcatgattcatgtggtattgtgtctttttcttaacagcaatagcgctaatattgcttttattggttggtttatccataaatgctagttctttatgcttgttcaatatgttagtagtaggttgctcctttctgtcggaagaggtctggatattaagagttgtggttgagggtgtaatgatcttttgtggagcatggttcacagtagttatttcattgcttagttcatttgaggatttttttgtagtatcttggttggaaaaaattgcagtctgaagtaagtccaatccagtcgaattcagacatatattactaatattttgattgttgctattaacaatttgtgtagaaggctgttttaaattctcctgggatgtgacgggattgtatccagatgacacattattatctgcattggtggattcagtgtagtatttttcattgtttaataaattattttttgttagggagttcatttggattggcaaaaacgttgtgctaaattgattaatattggtgctattatgttgctggttagatacatctatcttcattgtattctgcggcgctgattggtatggtttagtattattcgattctactatattttctgatgaatctagtggaaaattgctttggtatatgttggtatttttgttaatgtgatttcctacaccagtgttatcattttttctgtctgtactaagagtagaagtgggatcatatgcaacttcaacagccacactgtttgtaataggtgtactcatataaggttcccgtgattgtgtagtggcagaatactgtgtaatggatgaggattcaatagagtttgagtttacagatgatgtgctgtcaataggacttgttcgatctccaatatcaggaacatttatcggtgtacgtgcccttctctttctagttctctttgccaaatcaaatgtacatttcttttctcgttttaaacatcgaacacatggttttctatatatatcgttaggatcggatggaacacatttttgttttaaactatgacatctaacacatgcaaatgtatttcttttactcttccccttcgtattactttttagattggtaggacccaaaatcctaggatcgtcatctagtataccttggatgacagttgtacatagatcagtattatcttcagtatatatatgcatacttttgtttttgtattccctgaaacagacttgtctatcttcttcttttgtgaaagtttttatttcctgttttgtactctgaatatctgtttacttcatatatttcccaatgacctttatagactgatttcaaattacaataagtagtaatggctggctagtaccaattaatgtatagaatatctgatgtcttctatgtaccttttctcacagccatgttgaatgaagtcatcttttttaacgaagatttaccgggttttatgtaaactgtgcagatttttccttacatgacaaattttttttgtcacagttaacgaggtatgccaagccgttcatttacccttaaatttgccaaagaagatacagtgtttgttttcttttcatttttcatttttttttcagatttacttagattttcgtgtgttttacgaaaaaaaaaagttttttcagaagacctgagtcatagaaaatagcaaaaaaaaaagagatatatccatctaaatctttcaaaatgaacatattatactatcaaatacacaaaataatcttccttcttcacgtttcattagcaaattatacctgaattaagtataaacattttagacaaaccatcattcacagtaatgttttctttgttaagttagattattgagtatcattttaaaaataaaataatattagtgatattaagatttatatcatgttcatgttcatggcgattacataaaaaaatattatcaacgttgtatataagggtacctttttaattaaataaaacatcatttttatataaatgagttaaaatagtgattttaaagacagtaaagagaataaatatatgtttaaatatgtgtatacttaataaataggtttaataatatgtaggggaatcgtagatagtggcgaaaaaggagtggtaatgttaacattttgtatatacacagcagaaaaggattaaatagaaatgcatgcatgtatactatattctacgttatgatttaatgcaaacgtgtgatcctttctttaatctttgtaaatctgcgggagattgaattgctgcgggtgtaggagtagcatctggtttctttgcacggttatgggtcatatgactttgcactagatgtccagcagctaaagcagcgcataaggacaattcaccagccataactgcacaagcaataattctggccaattgacgagcattattacctggattagttggatgaggaccgcgaactcctaataaatctaacatagcaccctgtggttctaagacagtaccacccccaattgtaccaacttcaatacatggcattgatacagaaattcttaagtcaccatcaacttctttcattaacgttatacagttagaactttccacgttttgggctgggtcttggcctaaagctaagtagacagcagttaacaggtttgctgcgtgagcattaaatccacctacagaaccagccatagccgaaccaactaaattcttggaaacatttaattcaactagtgctttgacatcacttttcaatacttttttcacggtttcagctggaatagtagcttctgcaacgacactcttaccacggccttcaatccaattgatggcagcaggttttttatcagtacaataattaccagatacagaaacaatttccatatcttcccaaccaaattcttctctcatttgtttcaagacgaattctacaccctttgaaatcatattcatacccatagcatcacctgtagtggttctaaatcttataaacaataaatcaccagctagagcagtttgaatatgttgtaatctagcaaatctggaagtagaatcaaatgcctttttaactttagtctgaccttcttcagaatctaaccaaattttacaagcaccagatcttgttaaagttgggaatctgacacatggacctcttgtcataccatccttagttaatacagtaattgcaccaccaccagcattgatagctttacaaccacgcatggcagaggcaacaagacaaccttcagtagtagccattgggatatggtacggaacgccatctatgactaaaggaccaatcacaccaacaggtaaaggcatataccctatgacattttcacaacatgcaccaaagactctatcataatcataatgcttgtatggtaatctttcagtggctaaaacaggggaatctgataaaatcgagattgcttgacgacgaatggcaacagccctagtagtgtcctttaacttggtttctaaggcatataatggtaatttattatttgtgactaattcagtgacttcttcatcattcaatgtagcaacgttaccttcttttaatataatttctaattcagctaaagtttttggtgtttcgacttcagattcggcttcaagaacagttgctgcgttcttattcttattttttgatttacgtttattttttttagatttggaactagaagcaggtgtttcatttgatacagtaacttgttggtcgttatctttaattgtatcactagaattattactttgtgattgtgtgtcatcattggcagttattttattggctttatttttggaaccaccaagtgaagaagaaagtaatttggacttgatactgttccttctcttcaaaaattcagccacagtgtaactagtatgaatcttagcagcatttaataaatatatgttgatagaggcactaataatcaaagaaacaaagaccaccttactgacaaatctgtcacgaataactttacttagataatgtaacaaatccatgaaattgtcactaaaattataaataaaagtcgatttggtataataacgaattggagtcactgaaacaataatgttaccctttgataataagttaatatttttttgtaataaatctggtaagatagggtctaattgaatagaagtagaggttgctaaattattgtagacatcattatttgaattataatttaataatgcgctcattacagataatgattggggtacgaaattgataatgttgatcacaattaaacaggcaattaaagcaagtttacctaaaacaatagcagtttcagatttgaaatttttattgacctttaaaattgaattattatcagtattagaaatgatgtcagcagtttgtggtgtcacaccatcttcttccaaagtttgtttgataagtgtggacttatagattgaattaatttccaatttcaaagataatatagcggagaagaaagtgatggttaaaataaattcgaataaaacgattaaagcacaaagaagagagaaatttgaaagtgttgataacttgtaagtgtaaagagagcaaccgataaaagcaatcagacataatgatgtgtcttgtacaaaacggccgccatattctaccattgcatcatatattatattatcgtttgtttgatgatgattatggttggtttgatgacttaaagtagtaccaagttcattcgaagaaagatgacttgaatataagttggatttatatagcacagaagaagccaatttgatttgatgtctaaaacctagtactacaacgatgaatggaataccttgtaaaagagttgaaatagacacgtccttttgaaaaacgtaatgagatacaaatagagaaataaagaacgcacaagtagaattgattaaagtggcaaagcttaaccaaaattttgaaccggtacttttcatttcctcatatagattaataaaggtgtaacccatcgttaaataagccattaaaatgataaaaaaattcaaagaatcagtattttcaaagtctttagataaagaattgatggatttgatcaatgtatggtacaaggaatgtctttgttgccaaaattgactgattatatcgtgattatagtgactttgtaatctccagttaaatttttggccaataatcttttcactggtctttgaattagttgataaaatatattgagtatcattgatttggtataaagaattatttaaattgggtaggatgttttcagaatcaataaattttaatggagataagtaataatgtggtacaagtgtatttccagataaagaattaataacttggtcaaaggaaactgaagtcaaatcatgcttagcaaccttgttattgttattatataggtaatgcgaacaactttgtagaaaactgatatccgaacttggtaaattcaaagtgctatttatattatgactattgttattatgttttatagattcaaaagaaatatcattaaaataatattgtatagtagcaacatatgcaaaggttgaccataaaagaatcaataaaataatgtggattggtcttctagcagagaatctagctagatgcgctaaaggtggagccaatatattgaattttttactgaataaaggcattttattttaaagttaaattaagaaagaaaaaagatgtagactaaacaaatctacaaatatttagggaaaggagtaataaaataggtaaataaataaataaggaaataaataggaaaatataaaatatggactagattgaaattgtaataataatggttattagtgtgctaaaaaagaaaaaaaaaatataatttgtttgtttgatttatttgtaatatgttaaagttctataatgctcagatatcagttttcttttgaatacttctaaatacgctaatttcacctttaaaaaaaattgtctatcaattacactttatttgttagtttgagtgcttacatagacactgacaggtgtttcaaccttaattcatctatatatataagcaaagagcagaatctgtaaagagcaggagcatattacacaaaaaagaaaattattccggaaagtttatatcggtcttctctttttcagtgagaattataataatagagtttcttgcttttcctttttttttttcaagtcgctcgaggaataacaccataacaaaagaaaacaataatcgagctttctgttcttttttatttttatgatattctttgtttcttcctttgttcgtggaaaattacaaactgccagcgaaaaaatcaaagacctctttagttatgtttttttttgcctttgtccatagccctagatattctatttgtataaaagtaaatcttgtttttttttctatggtataccctaatatagtgtttgttgatattataagagaaagaaaaaaaatacgttaatatttttagttatttcaacctttttttctgttttgttcctcatttgtaaataaacatcctaaattctttttaatcgtgtttttcctagataagagagtcatacggtgacaccctagagaaagaaaaacagggaaggttgacaattttctcataataaaaaaagtgtttttaagtagtttccttttgtggttatgatagagtaactgttcttggatctatgcaatactattatttaacggtgtatcgctgtcaaaataaaataatgaaaaaaaaaactaaagaaaactaaatatccgatgattccttttttttttaagtccatacataacttagattatataacatatatcagtaagcaaggttctccacatactaaagcaagaaaatacggcaaaaaaagttatttgattttaaatttgattcttttttttttttgggttcttattttccatgattccaaagaatctactcagtaacctatcatctatcaaatatatccacagccgtagtagcttaatttagaatataagcacctgttatgaacatgcctcttgggcctcttaccaccaactgtacatcatcatcagtttctttggtaaaagttaaatccattttatattgactagttaatggtcttttggtacctaaattagcaatcacatattcttgaaactcatccatttgatgatcttccatgttatctttatcttctatttcttctccattttcttctttcattttttctaagtatactaaaatgtcttctaactcgttaagacctgaattgcctgatccagtgtatcttactaaatatagtgaagataaatcaggatttgtcgtatgatccacctctttttctgctttttcattaggtattaactcttcagggtctatactaacaagtttaattttaatttgaacagattgttcatcctttaaaatggaagataaatcatcactttcaagcaaatcaaagagcgatttaggaagatctggttctaaataaatttgaaatgatgtaccactaaccatgcaggacttattaaggaaaatgaaaaaggcgaactgtttcttctgtcaattttttttctttattgaatgataagtgccattattgtataaaaaaatattttcaattctttccctatagccattttttaaattattcattttgttttttgttttttcatttttcattttttttgttatagagattcatgatataataaaaaataaagaaatattaaaataaatgttcatgactattagatgaagaacataacatatagatattttaacagaaaagactagaagaacaaaaacttcattgtgatatatataactctggtaccatttttgattgtcttaaaaatacgttgtctaacaatgcgttttctttattttatttttgtaaacttcatatatatttatctacagaactccttatccagtctatagttcatgttctacttgtactcaaatgagccaacaaaagttttccctattttgttatgtagaaaaggtatctcttgtagtatgaccattatcaattaatgaaagtttatgcattttgtgccatacgttgtcttgatgtcattatagacgatcttgtgaattctttggttggtgacaatattcttgtttttcttgtttatgtaagtataagtatttctgtgtatcttagctactcctagtgtaaaggatagtttatgtatcttagatagacaaccaacgaacaagtacttatctattttagtgttttagaagagtatattcctcataatagattttcatctattatatcacacatgccgtaatagtagggatattacaatcacattatcaaaaaatttttgagaaataaagatggacgagtccggaatcgaaccgaagacctctcccatgctaagggagcgcgctaccaactacgccacacgcccagacgatattgaaagttgttgtagtatggtatggtgaagttctttgtgtattccagggaagcgcaaataatattaatagtaattcaaataatcgagacagtaatcaactatagtcgatagtataattactaaaacggtcttatatattaagcggcttatatcgagctaatgtacttattcgaagttacttgacttgttacttgcttgttttttttatttatgttgatatataatatatatattattcacaagaaacggttatggaagatggtcttttatctccagaaaacgttgtccttttatatgttttctggagctcgatcgattattcaggttagtacattaaattagtacttaataatctgactggttcaatcctaaaatttattacattaatttagtggattagaactgcatcccaattctctaatcatggtgattagtaatacacatgagacttattaaaactgttggaaaatgagagtttattactgtcattttcataagaattatttttaattagtttttctatatattatgtggtgtacggatgtacataatatcaggaaaacattttaattgtcaccaaatatgtctttcgaagatttgaaaagaaatgaaaaactttaaaagaaaacttaaagtaaataaaagaatgtatactgaatacactatataataaatatgtacaggtatttaatacaaaaacataacaagtatctataacttaatgatgtctatcattaccatggacgcagaaggctccaaattccaacaaaaacaataggtaaattctagatttgccaaaatcttatgtaatctaatctttttattatgcagcatctaactttgtagcacgtatgtggcttattaagacaataaatagttctagatttattcaggatcttatgtaatcttgatggttataattattctattccacaccaaaaaatgtcctctcgagtccgatgtagtgtaacggctatcacatcacgctttcaccgtggagaccggggttcgactccccgcatcggaatgttttttgcaattttctaacatatgaaatctgtaatatccctgattttactgtttggggtttgtttagaaaaatgagggttgacgatatttttctaaactttcctttttgcaaattttacaaacatagataaaaacaggagtaatcaacataagcacaagagagcaaccaaaaagaagaagaacaagaacgaacaagggaccaaggattacataagtttagatatatagtatataagtgtatactattaggttatcttaaattagggatatatttatatatctatattgttggaagttggtgccctcagcatacagggtaatggcagatatcattaagttatagatgcttgttttacttttgtatcaaatacatgaatatattcattttatagtgtatacagtataaatttttgtatttactttagggcttcttaaagtttttcatttcttttcaaatctctaaaaagcatatttggtgaaaaataaaatggtttcccatatattattgtacatctgtacaccacataatatacagaaaaactaatcaaaaataatttttatggaaatgacagtaataaactgtcatttaccaatgcataccgattataccaattactgtcttcgactattataatatctgttagatattttctgcacttcctgactaattaataaaattagaggccagttcataccacgacaagttctgtcttgttgtggtattaagtagtttctagtttataaatacagtgcatatgaacacaataggtaaatttagattcgactagaatcatatttaatctcgatggcaatggctttttattgcacaatagggagtttctgtgtaataagatgtcactaccgctgacattatgtaaggttctggttagatttggaagtatgtgttgtgttactactattaccagaacctgttatcaaaaatactccatgaggtttcattgaattattattattaataattattatgtaaattggtaattgactaagacattaaagtagatagcgaattgagttctgaaaacatataaaaggataatactttttagaaaataatatatcttccttagtttttcttttatgtataacttgtatattacaagtagaaaaaggccaaaaaagcacaagcaatactgttcaatatattttccattaaaattgtagaataatcgatttatcgtctgcaataattgctgtcttcaaaatatttataacttaaacggtgttacctattagattattaattaagttatttaagacttactttaccacatttcttgggggaaagagtatgtaaaattagtgagttgttgagttatattcttttaattgctggagatttattcaacagacaaactgtactatttaatataaatatgtaataaatgtaataatattttattttttaaaatatgttatcctttatatcaacatttttagaaagtagtaaaaataaaccacatttttgtcttgacttaagaattaggtaagtcagaatagagtttttttaaaaaactatattatcttataaataatttgataagatggtgcaattcattattttatatataaaattagcgctaaaaattagcgcctttagttattgaataaatagtatatgttctcaatgttagattagtatatatagtgtacaaatttatgattaagttcttcggtttttttagttatacataatatataagaatgatttataaaagatgaataagggaagaaacatgatatgaaaaaagtgttggctttatgtattttcatacttagaacatcccagctatgcgcagcacctaattgttgacaaggcttgtttacatctactaataagtaaacaagatgttctccattttttgttataaattaatatttactaaaatctaattggcctctctatttattctggaacgttctatttcagcaaatatgtatacctttcttggaaaattttgtagattcttaatgtatatattattttgtataaattgctttgtatttggatattaaaaaataatatattacagcatttgttaagtgtgtttcaagccctttattagaacaggcaatattagtgataaaacaaacttgaaatggtctctatctgaatataattttaaggatatacttgtcaaatcagtgcttttaaaactagtattagttgtattaattcttttattagttaatcgttgttagctttttttgtattattattcattttttatatttatgaataaagttaaattattttgagcaagatgttatattttcttcgcttaatcttattttcagaagtttcattgaaaaaaagctactgattttgatgtttgccatatttttaatttaactctaatatgactaatgatagtaaaaagaacggttctggaaacactgtgtaattttttttgaatataacattaagttattgagaattttaccttgtgtgttggcaatgattactatttccagatcacgaaaattaaatgttacgtcaagtaataattatgaaacagttaaattcaacatgtggtatttaaattgatatttatttaatgttgaacatatataaacacattagatattctgcattgatactttattgaatttgattcttatgtaattacatattatgtatgctgtatattacattattttttagaattcacaaacgaagaaatgagttacataatatattatcatatcgaatgattttatttattttaaaaactagcatgatgttcgtgttttttagttaatacagaattacatcaaatatctggtatccaaattatagtccatgtataagttcagtgagaattgaagttatatggaaagcacacaactttatgaaatacggttaaaattaataatagcttcatattgcataaaaaggcttaaatcatacaaagcaagaagaaaaaagttggttagttctatcatctatcagtagtcattattgtcgatatatatgatactagtaagaaggaaatagaatgtaaaaaaatatctgtttggttaatgaattatcttatattgtgtaagacggcaatgatacttataatatttaaaagtcgttagaacttctttttgccttttttccaaaagctacaatatatatagatgcagtaataaaaacaatctgtgaaatatcaatttctcatattttgaatatgcgtatattagatattttgaggtggtaattaataattatagtaatgatatttttttctatttttattttgttatttcttcttgattgttcggagtgatacggtttatttctcatttattggtgtacaagatagatcataacagtaaaattcaacagtttatgtataaatataaattgcatatagaataaaaagatatcttaagtgctatacactctcaatagtatattatatattttccggataaaacgtcaagttctatttatatatatatatgtatgcatgtattaatagtagttcatgttagttattcaaaagttatttgtttcaatatatatcaaataaaatttactttttattttcttatctttacttgttcttccgtttttttattatcatttagcattgccaagtagtggaaattatgaacatttctactatcaaataaaataaatattctcaatatatagcttggtagaaagaatttaattagttaagaagcattcaatttactagggtgtaaataaccaaatggcacaaaagtaaaaaaacactaatattaatgtaaaagaactatgacgatacaacgattatattaggaaatttttatttaatttatttaaataatatatgatatacttatttattcagataatatttaaaatttcaataagtgtggcttgtcaccgctctttaaggagaaagaagcagctaagtattgctttaataatggagtcttcttgatttcagctaataaagccttgtcaacaaccttttggtcttcaatcctttcggtcttgatttccttttgttgttgttctgggaataagttagcttccttcttttccttcttagataacttagaatctctagcgaagtattcaacgttgaatttttcgacattgacagattcgacgttaatcttagtggaagtggcaatgacgtaacgagcattgactcttcttaatggaacaccgttaaccttgaatggaccagagactaataaggtgttgtcttctaagtgctttaagtaaacaactcttttacctctgaaacgaccagccaataagatcaagacggtacctggaactaaagaggcacgtaacttttgtggtctaacggcctttctagtcttctttggagctgggacgtcttcagatggataccactttggaacctatacagaaaagaaatgattaattggaatcataaatgtaaaattaatcacacatgaaacaaaacaatataatgtcatggagaatattatcactctagacaaagtatttataattgttagtataacgagctccaccaaagaaaatcttatgtaaaactgaaatggtttcatatttaatatatctttttgggtgatatagtggtcatggtttctgggattgcaatttcaattcttattctatatatttagttatctctcctgatgacaaaatattacaacatattacatttccacttgatttccatattatccgactcatttattgcttttatataatctattttcgatacttgaacagttttcacacacatgatatttaccagttcatgtatacataattttatatttcttcattggtttttccatttcttttatttttgcaatggtgtaaatttaacatacggcttgggcactcattttgttatatatgtttcgggtttccttaatcgaaggttaaaaagtcagcactgctgtgcaactgcttattgtgtccttaaatgtaaccttcaattttgttatattgaaatttacttcaagctagtaataacaaggttaacattattgaaggctattacacattatcagagactcgcgtcagaacaaagagatgcaagtattaaacaactaattcagttgcaagggtagcagagggatcctgtttcgaacagggaatgacttcacccacctatcccgtcctcaccagtaacgttcttggtaatgtgattgcttctaaaggattggaactcaatcaccatcacactaactctctctactcaggaagagggaggaaagaaggattccaccaagagaaaagaaatccttcccccccgtcgtccttcctgcattccccagacggtaacttccgaaactaactgtcagtaaaacaagctgtccaattttcctggtcgatcttgttgctcagcctaacattgggttcctcgggaccgtgcgggacaagtgttgtaatgaatgtgctgccccaacagggtacccaaaacttctcctgtttcccctttctgaacttccttccaaatcaaatgggaggtaggctgattttgggcttatatgcttatgcggaacgattccttcttgagatatttttgataagagacgaaaattgttcttcaagttgatgtttttttcccatgcggagatcggcatcctaaattagaaaaacagtcatggtgcccttacctcttaaaaatgagaataaaaaatatacgttaattttgtggtgtccagatttttgaaatacaatacagtcattaatattttttatattagttttaccataattctatatacttttagtcatgcggtaataacatttatataatttgaatttattaacttaattcattacttatttattatattttacataaagaaaaaaaagaataaagttcgactttagaatatatattaacaaaaaaaaaattaacatgaaattttgtgtatttgtctacgaagttttatggttgatattgaatttggaaaataatacgacctgtaccaatattcacagcagccttctcgttgtctttgatctccggattacttaaactaactttacctacaccaatggatttgtctttggttaatttatgtgatttcaaggcctcaaactcgatgataccgtcaggtggagaactgaaatgagcagattgcgcttgatagtagcatgacccatcggagtcccacttacctaaaccagttttgaatatttcatccctctgcgcacctttaattagtgtgactctaacagaaatattcttacccaggtctgtagcagccaaaacagatattttgccatgacctttagataaactgaaagaggaactggacttgacactgtgatttgaacctttcattaagtgactaacaccacccagtgtaggtatggtaaatttactgtgatgactatttacactttttgctctactttttacacttttagcaccatcagtagtcattccatcattatttggcatgtttggctcctcatcatatgaaactctgtactctggataattttcaccagaatcatgattgctcttattatactgttgatcacggttgtggttcaaggggttcctcatattttgaagttgttcgttagtactatcatcattatttcctaatgaaatcttgtcaagttcagatggtgctatatctttagatttagatttctcaaatgaatgtctatttgggatcaatttattggggttaattgtcttaaatatgtgaccacccgctttaataccaccagatacaacagtagtaccagtgctacccacaattcctccgactgtaccgattgcttttaatggtgctgaatcagttagacccttttcctggtatgttatatctggcttaacatactgagggacaaatgtagtttgtatcttaatggtaccttgggtattcaatgggtattcccaaacttgtgtattgttgggattgatctttttaaggtcaaggattacttcgcctaagaaatcattgtcacctgcacgatcccaatctaataatttcaacattattttgctttttatcatagatggaatttttaagttaacagtttcattccatacaggatctagagtctttttaatgatatgtgttttgaatgttttatgttcattgacataaacttcgacaaatggatcagacttaccgtttctatcagctgccattaagtgagatgcactaactaacttcaaagatagaataccagtatccatcacagtttcttcgataggcaaatccttataagttgggtagtaatcgaattttacttctagggaagcgttcttgaactctatattagttggtgtatcaaatccattttttaataaatctaaagttgataagtaaacatcagagacaaaatcatctttattcttcactactttcttccttgttactctaaacaacagtttgctgtgtttcagatccctaatcatgacattggtgctgttacataaggatgatccactaatgtatttattggaaataaacactggataattgatattgtctactaagatctgcagataggatgagggaggtaccttcccttttgtaatagaaatagataaaacacctgagttatggttaattaattcatcaaaaggcatcttttctttggcattgatcttgttttcatcttcctcaaacggatctttaatttctacaatatgccaatcatcagggttctttttcatttcctccttatattctgcctgcatcttttcaaattcttctttcttagctctcagttcattttctaaaatttcaacttcttttaattcttctgctgagtatatctgcattgtattgacgaactcaaaacctaaattgataatatcagatgttctaatattagatttattaaacagattatatgtttttaattcattgttgaattcaggtttacatgaataacccttaaagtttttatttttttgtaaaattgaagacacagggaagtgaatggtaccaatatgtctatcagacccaacagactgataatcagcaacagataaagataatagttggttttcagacgtaattggaatatatacaaccctgtcaaagtgaggtttgtgagtatctgagatatgctcagatttgtacctaacgtgcttattaagactaatagtaaagtaaggatcaatatcaccaataccacttaatgcagatctaacttctactgaagctacatatattttcatactgcctagtggcgaagtgcttaaagtactgatggtaccgacaccagttaacttgagtggcttccattgggatacaaagaatatttcaccttgtggagaggctttaatactatcttggccagcttcacctacattaattaaatcttctacataaccagaatatgaacacagtaaaaccttaccagaagcacgattatcgtatacattaagcgttaatttagaattctctttggatgtaaccaaaaattcatgtaattcattccacgaaggttcattaatacgttttaaaatccgatagcgtttgactagtttcttgtctaaaaataattctacagatggagataaagaatttgatatttgggaagtaattggtaggtgtctgattttttgtaatgtgaatttaagaataccagtatcagactcctcttcttgctcttcttccatgtcttcttcttcccaggactctttttctagtgttttttcctgtatatccttcttgggtttttcgattattggataataatggatagaataattcaaagtacctttattttttgaaccaataaataaagtatctgatgtattttcaataataggtgtttggtaaagtgtattcatatcaaattccagtgagccaattaactgatcttttctaacatcgttaaagtcccaacagttcatagttaatttctgatccagggaattaattaagatatactttgtttcattccagacggggttcttgttatcagatttaattgtagtatgagcttcacattcttgataaggcaatgatttctcagtctttaaaacaacataaggatcgacggtattggtgataaaatcagaaccaatcaaattattagcagaagagactgttattgcgacaacaccaatggcttcgtttgactgagctgccattatctcttcgatatcaatatccatacaatttggagcatataacattggaccagcattactgtcaatcattttcttaacaaaagtttttaagcctggtaaaaacgacatcacatcaatacccaatgtatcgccacctagtggttttaaaacgaaatcaatcaatggaggttctagaaattggatagacacaattttaatgtttgggaaagtctttccaaatgtgagtctaacacggatcttaccagctacattaatgtcttcgacaagaacagaaagagttttagatacaatacctttacctaaagtgacccctaaagaaattttggggttgatcttttctttagcctcatttggagtcatatcagaaacatcatttggggtgaatgcaaaggaccaatccatctctacaacatccttgccagctttcgtataggatttaattcccttaatggctggtgctttagaacctaaagtgaactcttctaaagttaacgcatcaataccataaccaggaaccatatcagaaaggattgggtttgtaatatccttgacttgtctagatagaacaggcatatagataacccaaaatttggataggaaggagttcaaccacagtgtagtttcaattctacctgacatcgtctcatctagtgtaattctttttaaatcatctctgatatttctattgaaacgacgatattctgcattatatacagaagtagtgccaaaaaagacaaatcccaaggaccaccaagagaagccaaaataaccaaaaagccatgcaaagaagcatgtgcctaccataagtacaatatttgagtaccaatcactataaaaattttctagaatatatttcttcgtaaaagtagcattagcaatatctataacacctcttccagaaaaactaaaccccattatctttttccaagggaagaggttattcactgaatcagtttctactagatttcttaaagcagctttatcagccggtgataaatcatcaagtatacccggaccagaaatcgatgtgtcatatttgtttatatctctactaacaataccttttatatctttagaatgtaatctttctaaaagaatagattctaaagtaccttctttattggctaccggcaagtccctagtttgactcatatttgcagcgacaataacatctggaataccattgctttccttggggttgctatcagagtcattttgactaatactagattttttgttaattcttaggctgttattatctatagacggatggtgttccgcccctgaaacatacgtttcttgaacctgtttgttcgaattatcaaccttgacatgttgttcattgctgggtgactctaatggaactagtggttcagactcctgtgcaaatgttgacattttagtatttttctaattaatgaaacgtcactttattattatgaagtcacacaagaataattaataaatacaataaatgttgattttttttatgaatgttgttcttgctaggatgaacattaagaaagaactaaaggaggaataaagtttttttgaataaacagtagaggttatttataaggtgattatgattcaatgttgaaggatcataaataaaactgtaaatctaacaatatcaggcaactccttatttgttttgttttgttttcgctattgttttcccctggtgtcttgagggaaggaaatttttgctaagttggcgacgctatcaaaatgcatttaacccgcactttaccggcaggagccttttatattccgttagatcaagagaagatgtataacgtagcagtatgtaaagatattattattcgatgtaaagatgtgtctatctattcatatacgtatgtaaaagctctgtatataataacatttctcaagaatatctagaagctagctccgcacgttttttaacggcttgaactatttgatctttagtgaacaacctgctttcaaaaagtctatttaagaaacaataatgataattgatgttcaaatcactcaatctaaaggaacaataaattagttgaagacagatggaattgtttagaatttctgtagagacatttttgaattcctctaacaaacaattaatacatttactgaccatctgcaacattagtggatttgtgtctaccatgtttgtctgtaattgaaattgtgggattagatcatattcttcctcttcatcttccttatctttcgttgctatattgtcatattttgtttcttttgtcttaacatttctattgtcgtcccctgatacagcatttgattgtgttggtgatattttttcactatcattttgtacaggttgttcttcagtattctcattttcagcactactgtcttcgtctttcaaaatattgttggcagtacttgtatcttttatgttttttttgtcttttgatggaattaatttatcagtaatatcttttatcaatggaataagtataggtatagattcaatactaaaattttgggaatatatgttcaaagaactgtagagatgttctcgtactacttcaatcttccttttaataatcatttcaactagagaatcattcatttctgtatgtgcatccaatgaatatgaaagaatttcattacgaataaattcatacctcattgataaatatacatttaacaaggtatttgaacccttcacgtcgaatggtggtatgacacttaaataatttagaatctttttgattgaatttacacttaaattagtagaaagcaattttaccaaacccactgccatggtattacttacctcgtttaaaacattgttaaatatcccttttacaatatcagaatctggaaatttcatttttaaagatttgcagtaagaaaagaccatgattgcttcttggtagtgaccggttctgatacatgttctggtcaaaaatggtaattccatcaggtctgtgatattttgtaaattgatcaaaataaatgtcaaattttcttgcatttcttccttatgtttttttttattaatacgttctcttagtttatccaaagcaatatggaaatcatctttcggtttgttgtttttgtgtgaactcgaggaagactgagaatccatttttgtcgtattatctgtttccagtaattcatccactgaaatcagttggtcatcttttttttctggactaacattggaatttccttgaatattttgtggatccatttcccataattgttctaaatcttcatgtaattgatgcaaaacagattcgtttaatgtttcattaaggatctgtgttgagactatttctttattttgaaccaaaatttttttcagttttttctctaatatggataaatcggcatcgatttcacctatttcttccactattgtctgatcaagtgcttgagatgataaatatgtctcataatctctgtctggtgattgcaatatttcattcaaggtttttaaacaatgttcacgttcttcattatttgatacaatgttgtccaattttaatctttcataaataacatccattctgataaaatgggaagattttaattacaataacaataataataatagtgtggtatcagttatatctctttgtggttgatttgttaaaacttaataatagcagtaatgaacaagaagtgacaacgtttgaaggaagagataacggtccaaaaaattagttgaattgggtttcaatggtaattcaaacaaaatggttgttattctgttaattacatttttaaattgttcgttgcaggttatctgtatttgtcttcatgaagatattgtcttcctattcaagtgttttgttatatttcaatgatcgagaaaaatgacaaagaaaggaattgaaaaaataaaaagtgaaaaataaaactaaaacagtacaagagaaggagggggggatggaaaaataatctgaaggttagaaatgatctggcaccttagtgtatattgtgtgcgcaaattaagaaggtgttattctccctttttttcctttgtgacatgtaattggattataactgtaacagctataacaaaggaataactcattaatctgtcaggatgacaattgttaaatcttttgaagttcaaaaccctcttgaaaccagtttaaaaggttttgctttggctaacccctctatcactttaataccagaagaaaaaatccttttccgccaaacagacaaatctaaggtaggtttaatctctggaggtggttcaggtcatgaaccaagtcatgcaggttttattggtactggtatgttaagtgctgcggtttgtggggacatcttcgcttccccgagtacaaagcagattctcaatgccatcaaactcttaaatgagaattgtaatggtgtattattaattgttaaaaattataccggtgatgtacttcattttggtctctctgctgaaagagctagagctttgggtatcaattgtcaagtcgtagtcattggtgatgatgttgctgttggtagagagaaaggtggcatggttggcaggagagcattagcaggaacagttttggtccataagattgtaggtgcatttgctgaattgtattcttctaagtatggattgaatggtactgctcaagtagccaagattgtcaacgacaatttggttaccattggtgcttctttggatcattgtaaagtaccaggaagaccattcgaaagtgaattaactgaaggacaaatggaattaggtatgggtatccataacgaacctggtgttgatatcttagagcctatcccaattactgaagaattgattgaaaagtatatgttaccaaaattattggatgcctctgataaggatagggcctttgttccatttactaaagataatgatgttgttgttctagttaataaccttggttcagtctctaattttattatgtcttccatcgctgccattaccactgacctgttaaagaagaaatatggtattgttccaaaaaaaataattgtaggatctttaatgacagcattcaacggtaatggttttagcatcactttattaaatgcatccaggtgttctaaagagctacaaaggaatttcgaagaaatcaaagacgttatggatttgatcaatacaccaacagatgcacccggttggccaatcggtgaatttaagaataagatggcaccaagtattgatgataagattttatcgaatgatattaaagtaaaatcagtaggtaaatatgatttcgatgccttcgctaaatggataaaagctggtgctaaacaaattgtagaaagtgaacctcacatcactcatttagataatcaagttggagatggtgattgtggctacaccttagtagctggtgttaacggtattgttaacaatttagactcgatctcaaaggaatatttgtctgaagccatggcacaaatcagtgacattattgaagattacatgggtggtacatcaggtggtttatattccatcttaatttcgggtttttctcatggattgatccaaacagtaccaaataaagatgaaccagttaccaaggaagtagtgtctaaagctttggagattgcattagaaactttatttaagtacacaaaggcaagaaaaggttcttcaacattgattgatgcattagagccatttgttaaggaatttgtcttaactaaggatttccataaagctgttaaggctgcagatgaaggtgccaaatcaactggtacatttagtgcaaaattcggaagagcatcttatgttggaaattcatccaatgtggaagatccaggtgctgttgggtttgttgaatttgtaaaaggtatggaaagtgccatgtaatagaaaggttaattaagataaacccgtatatctacatatggacatgatttatgactttcttagtttatgtatttttttatgaacgcttttttttacatacacgaaatgatttatagaattgtcatataatggtgaatgtgtatatatatgtatacgtatatatatatatatatatatactatgttatgcatctattataatgaataacatgtattaccatattatccctacccttactattacaaaggttaccagaatattgaagatggaaatatcacttgtttattacattgacattttagactgtgtgcatagctcattatactatagatcagatggatacccatacccatattagccgtggtatcaatattagatgataagaataagcatatattcttcgtgcacaaatcatttacagtgaaacatgccattatagagacagctggtttctttttctcaacatacagcaagagttcctgttatcacagaggagggtgtcttgtgtttttctttctttcccccgcaagacgaaaacattgcttttggaacttttaattcaagtaaatggataaatttgaaaaatttagttgaaataaatacagaaagagagaaatgagggctaatttgatgaggaagtctggaactctatattaacgagacgtaggacatagctagtattgtgacatttagttttgtgtttactgtgtattgtgtttaagaagattacgtaggaaataaaaagcaataataataataataacataccagagatatcaataatgagtactgattttgatcgtatttatttgaatcaatctaggtttagtggtagattccgtattgctgactctggtttaggttggaagccatctgctgctggtggttctgcatcccatcaacttaggacaccttttcttttgcccgctgctgaattgtctaccatacaatggagtagaggtagtagaggctacgaattaaagattcaaacaaagaaccaaggtgtgatccaattggatggtttttctgtggatgatttcaatttgttaaagggtgattttcatcgtagattcaatatccaggtagaacacaaggaacattctttacgtgggtggaactgggggcaaactgatttagctagaaacgagatggttttcgctcttaatggtaaaccgacttttgaaatcccttattccagaatcaataacactaatttgaccggtaaaaatgagattggtattgaatttaatttacaagacgagaactatcaacctgccggtgatgaattggtggaaatgagattttatgttcctggtgttataaatactaagaatgaggatgaagatgggaatccaatcaaagaagaggatgaaaatggtgaacctattgaatctgatggtgtggaaaagagtctagcggaagcattgtatgaagagttgaaagagaaagcagacattggtgaaatggcgggtgatattatcgtttctttccaggatgtctttttcgctactccaagaggtcgttatgacgtcgatgtctataaagatactatcagattaagaggtaaaacatatgaatataaattacaacatcatcaaattcaaagaatcatttctttgccaaaagcagacgacatacatcatttgatagttcttgcagtggaaccaccattacgtcagggtcaaactacatatccatatttagtcatgcaattccagaacgaagaagaaacagaagtgcaattaaacattgaagatgaggagtatgaatccaaatataaggataaattaaagaaggaatatgatgcaaagacccatattgtgatgagccatgtgttaaagggtatcactggttgcagagttatcgttccgggtgcatacaaatccaagtatgaacagtgtgcagtttcatgttcatttaaggctaatgaaggttatctttatccattagataacgccttcttattcttaactaaaccaactatgtacataccatttgcagatgttagttcagttaatatatctagagcaggccaaacctctacttcttcaagaacattcgatttagaagtttccttgcgtatgaatagaggtagtaccacttttggtaatataagtaaagaagaacaacaattattagagcaattcttaaaatccaagaatttgaaagttaaaaatgaggaaaaagatgcccaagaaaggctacaagttgctttgggttctgatagtgaggacaatgatattaatatgggttcagctggtgaagacgaggaatcaccagatgaagatttcaaaatggattcaagtgatgaagatgatgaggtggctgaagaattcgattctgatgctcccctctcagatgacgaagaagatgattcagatgacaataggccaacaaaaaaaccaaagacagagtaaaaagttatgttaagagtacattacagataaaaatagttctaggtgatgtatatatatgtaaaaaaagagagatagaagaaagtggagtaatatatagatatatgtatttttttttctttaaattggtgaataactaacttttttttttgaaagattcggatattgtagacacttatctagtggtaaagttgatgcaataattgtaatatagctaatgtgtatatcacagtagtaagttgttgataactttcttgtccaactcaattatttgtcaaatttatttattttacgtttcgttcttgtacgttgtatttcaattttcaactctaatttatagaatagaaaaatttagttctatttttcttttttttcttggaaaaatctttaaaaaaataaataatttttagaataaggtaaaccaagccttgattatataggaacttaagtattataaaaataagataaatgtaaatatgtggtgtttatataatatcaaacgtcgatgcaagtaatttttgtaatactatatcatataactagtcgaaataagtgcagataacaaaatcaattatctactgttatgtcaaatttaataaataaaactaaaagttgaccaaaaatacaaattacaaacaatacatcttagccacagaacgttttgttgagaatttctaaataaagtagaaatgagcaaatattctaatttaaaagaagatttaaaagttttgaaggacatgtatcctgaagtagaactgttcttcgatatgaacgctattgacaagaatattgtgcttagaggaaaacttcaatttgatatgtttctaccaggtgaccatttgttagttcgttgtgaaggatttgaagatttaactctccctaaattgtctgataatgtcttatcctttttaattaacccggaattttatccaagcatcgaatacgggctcaaatttgctattcattcctcatggatgtccaaagatgataaaacttttataataaaggctatcaataaagagtttagtgaattaactaatccaatgtctgattcatttgatcccactacacccatattgatgttactttttgatttccttataaatgatgtttccaaacttatattccctaaagatataaaaatatgtcaagctaaagaatcctataataaatttaaacttttgttgaatataataagtaaaaaggaaaaggagagaacaaattttaactgctgtatttgtatggagactaaaaagggtaataaaatggttaaattgccttgttctaatgaagaacaccatctttgtatagattgtttaacatcatattatagcacaatgattaatgagggacgaatgaataatgttagatgccctgaatgtgaatatcatgaaattcgcttagaaacattccaggattttcaaaaaatgaagaaagtattgtttacacccaccattccattcgaattctttgatggactcttagcacaagatatatgccaaagatatagggatatatttttctctcaatgtgccattaaattatcaaagtattcaccttattcatgctgtacctgccccagatgtgaaaaatggtgtatcaagaataatctagatgatctcatgatggaatgtgataattgtaaactcacattctgtttcgattgccttcattcatggcatggttataacaataggtgtggtaaaaaagtcactatcccagaagaagttcttgaagaatacatcaatgagacagaagaaaatagtgcacgaaagaaagctattgaaactaaatatgggaaaagaatgttaaccctagctgttagtgattatatggctgaaaaattacttgaaatcgctattaacatcgaagggtcagacttacaaagatgtcctaaatgcagatgtgtggtacaaagaagtgaaggttgtaatagaatgaaatgcgagatatgtggcactttgttctgttatctttgtggtgattcattatatgttgatgattgttataaacattttagagatcctaagttaccttgctacggaagattatttgaaggtatgccaggaacagaagacctgtaatatttaatatacaaatgtgtattatcatcaataaataacagagaaaacctatatcttcatatatacatacacatatatacatatatattcctaatggttacgttctattccagaatcccatgggattgaatatctggttgataatgtaatgaccacttaggtcctataaaagtaaccaaaaacaaatctattagagtgaaaagccatgatgcaatataaattgcaaatgatgttatagccactaatctaacgacaaattgtaaaaatgttaatcttttatccataacagcaatagtcaaactctcgaaattgtatctaaaaaagatacctggcacataccctgaatgtatcatggaaccatcattactatgataacgatattcagaaacagaatattgattcgtatctacctctgcacccaatttttgatatatcgtaggcaccactgaggtatagtaaacataagctgcttggggatcagatatatcaaatttagccgaggcgtctaatggattatcgatataagggtagaaatcaccaaaggaaaattcattaatcacatgtgcaaaattaattagttcagacggagtagtcctaatatctctgtaaccaacacctttggcagtaatttgcaattcacctgagactctattaactggtacagaaccaaatatgtgacaaccattaagttcaggtaaatgatgatgagtatctggatcattttcatcataataacttctcatatcaatcttttctctaaattcagcaggaattgcctcccccaagatttcatccatctctggggtaataatatgtggcagatcattgactctgacatcataagggataaaaaatggcatatcttcaaactgtagttcttcggaagcaatctttctatccatcgtggaatctctaacattgacatgaatgtattcacattttagatggacatataaatctagattgatttgcacattttctcttatttcgggatccacaacatattgttgttctacgtaaccgccaaaatagttaccaaattctgtataagcaataaatagtaaaaatagatatgtcagaagagtggtaactccaccctttgatgatttcttcttatattgttcctcagttttggctatacataattaacattaattaattactacactaagtagcttcaaaaattgatttgagcatacgtagatgaacaaaaggttgtatagttagtaataagatacgtcaaacagaataaaatagatattgaaaaaaaaaagacacatacgaaaagcatcaaatgtccttaaaccagccattaataagttactgatatatggtgatcgagatggtgtgagtctgttcttggtatatatcagattaacgatacatatgtttatgtataacttaacagtccatatttcaccagaatcttattcaaaacgttttcttttctagtagtcctatttttatcgaatttttcttaactaccaaaattgaaagcaatctcaaatttcaacaaaacaaaagcaaaagaaaaaaaagtgtcaccttgagtagtgtttgtcagagtatgtcgttatatgaaaaatgtatttttacatggatatggtttgttacatactaccttctctcaagattgaagttacgtatgatcacaccagtgattatgtgtacaatgatgatcaatggaaggctcggcttgaataggcggtagaatttcattgaaaagcttactttcatcacattgttttgattcagatccatttgattgtcttttctggagacatacaattattgtggtggcaatacagaatagtatttggatacaatatctcacacatccaaaaataaacccactaccaacactaacccgtataaacccccaatcgtcatcaagagttggaagaatattatcatagtcatctacaatgggagacaatgttcttaatatgatttgtaatataactgaattcaaaaaggttgtcgttgctagtaatgcatacgtaagtgcaattagaaaggtgattatacttacttttttttttgttgatttgatcaataaccatagagaaatgagggtagaaaaaaaacaaacacaagccatacccatttcaataaataatattattctaataccttcattgaaaagagtaaataatcttgcaatgataataattttttcaaagttagtaagacctttttttttcttactactgccgcctccacttctactcgtatctttaaaattttgaactgttgttttaattggagactgccttcccaaaattgttttcgtaaaaatgttgccttcccttcgatcattattaataaaatggaacaaagacctagtaactattttataagtgtaaacaacggagttacccaattttacactactgttcttatctaataatgatagttcaccgaattggatacctatatctctcatcagaactgtcattatatccatgccattattttcattggaataacacactttttttgtcatgtgtttatattttctgagtttacaataaccatgataatttactttaaaggaactcccccggtagaatgtgtcaaccaagcattcttttgaataaacgtcattgtttccataagaattattgaattttatagcgtcattcgatttccagcccatatctatagtcaagaatgataataatcgaagaaactctcttgctgcatcaattaattcctttcctaacgatgagtcatccatcgaagaaaatacaaattgtggtgtacaaagaggcaagttcaaattccctgtacatgtgaacgttggaatatataataaaatctgtgttattgcgagtatcagtactatactccaaagtattaatcgttttaaacccaacattcttttatctctgaatatgtaatgaaattatatgcaaatttttcccaatagtttttttggcgaattataaatcattaatagatcaaccaaccaactaacaacccacctctctaactctatgtcggtacatgctactgctgccatttagagtatgtatctctcttgcttttaaagcccagtgaatttgtgacgctgacattttattattagaaaacacgtactaaaaaatcagataatgaaaattgaaaaaaacaaaaaagaaaacgaaaaagaaatagacaaataaacaaataaatcatcaatacacataaattacaaaccatgaatactgcaagacaatcaatcacaaaaccacaaaataattgatgtataaaaagaccctttttaattctttaataaggaatataaggaattttttatttaaaaggaaataggatcaaagaatataactaaaaaatggctgaaaagttgaaagatatggaaggatggaaaatccttataacggatcaaaatggcaatattatcgaagatgggaaaagaagcaggtcacgtagagaccaaaggatagagaggatagttatagaaagatgctcggatgggttgcgactaactcgtggggatagtgttaaagtacgaaacgccaagccttccaaaaaagctccagatgcttttttattccgttttatatcagatattaaactaaatacactgaacaatgtgttagagatatgggtttttgagtttgtgaaaagaaataaaatagatccatatactttttacagagatatgaacccaaaagttttagaattgaatgagacatcagaattttattctagaatgtttgaagatgaagttggtcaagatgaactatttctaactttggagccctcggagatattattatcaaattttgtctctaaaataaatatagttcaagataaaggcttagtgaaagatccagagacagatcttgtctgtagatatttatgtgatgctaattttattaaatatgctaccttagactacaataaagaaacaatatgtatccaggatatgtcttttaaagccattgaagaacatttcaagaatattttatttcctacggaatcaaaacatgataattcaactaaacagaaattgtcaccagccgaatccaaaaaaattacaaagagatataacatagaattatcaatatcttcctcatcagaatcagaatcagaatcagatgtagataacgatatttcttcctctgaagagtttaaagataatgaaagtaacacaagtatcgaccatttcagctccgaagaggaagacagtgacgaagacgaagattctatagaagaagaatctgaagatggctctatggaagaagcaatcgacaatgaaaaaccttcaaacattatccgcaaaagagggcgtcccaaaactttaaataccagatctaaatatattagaaagaccaaaaaactaaaaaagattcaaactgaatttttcatcaaaaaattcacaaagaaaaacgtagttagagctaaaaagaaatatacgccattttcaaaaaaatacaattctattgatgatattcctaatcttaatagcacacctggattttaccaacaatcccaagaagatatttataatttattggaatctaagttagaaacaaagaaacaacatgaaattgttgaaactatcttttctaaagttaagaaacaattatattcatcccatggtaaagaaatgattatgcaatcaaaagattttgatgatattatacctggtagagaaaatgaatttgcatcgatatacttaagtgtatatagtgctatagagttgggttctgcaaccactgtctatattgctggaacaccaggtgtagggaaaactctaacagtacgtgaggtcatgagagaaatatcaaagtctgctgttaatgatgaattacctcccttttcatatgtagaaatcaatgggttaaagatggtaaaacctactgatagttacgaggtgttatggaaacgaatctcaggtgaaagtctaacttggggtgctgcaatggaatcattagaattttatttcaataaagtaccacaagagaaaaagagaacaatgattgtattattggatgaattagatgcattagtaactaaaggtcaagatatcatgtacaatttcttcaattggactacgtatgaaaatgctaaattaattgtaatcgctatagcaaacacaatgaatctaccagaacgtcaattaggtaacaaaatatcatctcgaattgggtttacaagaattatgtttagtggttatacacatgaagaattaaaaactattattgacttcagattgaaaggattaaataattcctacttttatgttgacatcaaaacagggagtgcatttttagtaaccaataatgaagaagaagacagtaatacaaataatgaaggtaaagcagagagtaaaataccttcaggaatgaaaagagttcaattgcgtatgagtcaagacgccattgaaattgcatcaagaaaagttgctagtgtgagtggtgatgcaagaagagctttaaaggtttgtaaaagagctgctgaaattgcagaacagtactatatgaacaaacatggttatggctatgatagtaccaatagaaagaaaaagaatgaggataatgaacaagatgatgatgatgatgaaggaacaagtgaagatactgatgaaatccaaaccgtccatattaaccatgtgatgaaggctttaagtgaaacaattaatccctactctgttaagtatattacagaattgtcatttacaagtaaattatttttgtttgccttcctaaatttaattaaaaaaacaggtttacaagaacaaacattgggtgatataattgatgaaatcaaaaatttaattgaggtaaacggtaataataagctaattattaatttacaagatatgctctttgatagaggaatacctgaccattatgaacaattaagaatgatatcatgggaatatttattgaatgaattaattgaagctggactagtaatcaaacagactatgagaaatgaaagattttcatgtgttaaattaaatatccccactgaggatatcaaaaatacattatatcaagatgaaactttaaagaatctataaaccttttgctttggtattaatttttcttcccagcatacatatatatataaatgcatataatttataaatttataggacatgatactttatcaaggatgatgatgattatatgaggtccttatggggaccggtgatgctgaaagaggtgcattattaatattattatagttagcgccattcctgttatgactgttataattgcggctagtctttcttcggaggtttgcagtatctgaggaagaattatttgtgtgactgttatttctagttaaagtagtgtcatttgctctttcactataaatcaataatggatctcctggtgtttttatctcatctatagtcaatgttaaattaaatattttagctaatgcaattttgaaaattttttgaatatgaattgatcgtgctgttgaacaaaaaatcaatggagcgtccattgcttgtgaatattccattgctactaaagatatgtctttttgatatttcatgtccatagtataaaacaaatcaaacttggtacctaccaagatgggtatagccaaatcattcaaccctttagattgcctataccagtcctttatagattttaatgtctttggtctagttaaatcaaaaagaaaaattatcacggaagacccgacagcagcaagtggtagcatgttgataaactcactttgcccaccaagatccatcaaagaaaatactatctctgtttgctttaatttaattttctttttcagaaaatttacacccaacgtttgagtatattcattatcaaatatattctgcacatattttaccattaatgacgttttccctacttgtgcgtcccccactaaaccaatctgaatatcaatttgatttttcacatctggaattggatcatgacgacttacattgtttctagtggatggagacattattctacctgatctattcgatggaaagctcaataagaaaaactacaaattgcagcagcttagaaaatgactgacaaaaacacttataacagatggcgattaaagaacccagataaaaatggtccagaaaacaattgttaggataaatctagctaattgcagaaacgaattaattgttgtgcctatcagcgtgttatctttgatatatattatttttttttttttttcactctagcccttctatattacagaaactgctccctcctcattactctcaatatcaaatttctcgaacagtttcaattaggatctctctacaaattgtctttatgatttttttacatatattttcctattatgtatttatttttcttctttagttttccccttttcttgcaacaatcaattaattttcctaaaagagcaatacagaaaacatacagaaaaaaaaacaccaaaaaatacaacactacaagactgtgcacggaggtacggatgttattaattaattttctatctaaacaaacaagttttttagtatttcctaattaggttaaagaaacagaaggggaaacaaatatgacacctttagtcaaaattcgggatttttatatcggaaattgatgatcctgaaggacagctactaggagaaagtttcaatttctttttttttttttttggttttacaagaaagagacttagagcggagaaggaaaggaagactatggacgaggaacttcttagtgacttttcctttctagaccctgagaggggggggaggaaagataatcaacggaaaagtccatgacccagctgtacggacactcatagtttcccctctaactgtttcacaagacattggtacggatattcccttctagagagaccccatccccccctagcctgcccacagttccctctgaactctaggccccaaaccagatgtagttgtaagggagagagacagtggtcctgatttccctccatgacagccaccctttctcactaccagcaagaaattagcgagtatccatttcaactggagagctggagggcaggtgccaaaattatccttcttcccaggcagacaggcagacagacagactgcaagtaagaacatcttacaatcttcaactccaccaagggatacaatgagccaaaccaacaaggaggaaacaccctcctgaacttctttggaaagtccaaactccaacctcaataataggatagtaagaaattggaagtcagaatgatatgtgctgtcctttggatagtagcaatactattcaatctcatctacaggtttcttatttcgaaacgggtaaaagtgtatattgagacctgttacagaagtagcctttattaaaagtactgctgtggtatttgaacttggactatttggtgagagagttcccttcagttttaagaaaaccgaaatcaaatactaaactgactcagaatggctgttggtaagaataagagactatccaagggtaagaaaggtctaaagaagaaggttgttgacccattcgccagaaaggaatggtacgacatcaaggccccaaccacttttgaaaacagaaacgttggtaagaccttagttaacaagtccactggtttaaagaacgctgctgacgccttaaaaggtagagttgttgaagtttgtttagctgatttacaaggttctgaagaccactccttcagaaaagttaaattaagagttgatgaagttcaaggtaagaatttattaaccaatttccacggtcttgatttcaccactgacaaagttagatccatggttagaaagtggcaaactttaattgaagccaatgtcaccgttaagacttccgacgactacgtcttaagagtcttcgccattgccttcaccagaaagcaagctaaccaagtcaagagaaccgcttacgctcaatcctctcacattagagccatcagaaaggtcatctctgaaatcttaaccagagaagttcaaaactctactttagctcaatttacctccaagttgattccagaagtcattaacaaggaaattgaaaacgctaccaaagacatcttcccattacaaaacgtccacatcagaaaggtcaaattattgaaacaaccaaaattcgacttaggtgctttgatggctttacacggtgaaggttctactgaagaaaagggtaagaaggtttccggtttcaaggatgaaatcttagaaactgtttaaaaaaataatgtatgattagttatttatattttactagatatatacacctacatcatatacatacactattaataatttaaacaagaaaataaaactatctattatataatgtaattgtttctgtatatttttttgttcttaaatgttgttagttacgctgacaagtgtttaaaggagttacctatataagcatatttatggatatttcctctaacatgctggtggattctgtcattgtttcttttgatgacatacccattatttttgacagtaaatggtacatgcttgctatttgaatagtacataagtttttaatacatattattatcaactttatatatccatattggagtccaattctttgtcaatattttcttgaggtacctgtatttcagatgtgccctcaagctcatcaatctcttctttatttctttcttgtacctcatcatgttctgattctgatccgctatactcatttgactcctccaattcatcaccttgcctaatttgttcttctaagccaacatcatctgaatatccatctgaataaacctcaaactcgcctgcttccacatctggtacttctccatcatttatatccataacatcatcttcatcttcgtcttcaacatctacgtccatatcaacatcactatcttcgttattttgattaatagtaagttgccttttcttaagttcttcctggaataaatcagttatttttgtaaatatttctgcatcttttaaccactgatctttatattgattcaactctttgtttaattttattatatcatctttcattgttctgttgacttgctcagcttcctgtggtcctacactaaaatcatcaatagtacgatacttaattttatttacatcctcaacaatagttttctgcatagcatcctttcttaaataattgtttttaatcaaaaggtcagttaacggttgacctaattgtgactcccattgctctctactaatactaatactggttctaccatcgtttaatgactcaatttctttgttgatcatgtcaatgtttttatacatcttggtaattctatctagtctgtggttcagttgatctctacatttcttcaaatctgttaaaatgtcatgagatctatcatctaatgtattcaacaacacttgattatgatgtacccaattctcatatgcaactttcttactttcaatagaattttgcaatgccaagtatcttagttgtgatgtatcaagcatttcatcaatagtttgaacattaaataaatttatatcttcctcattattcttatctagagtaccattaagaatcttgtgggtcaaacgtgtaaccttacttagcacgtctaaatatttattaaatggtacatcaagttcactataaagtaccttagctttaacttgttttgtagatatgtccactgggctcatttgtataaacttttaaagctatctataaattctgggattataattccttactcttttttcttcacaacattgtaataatgtttgtatttcactacgcaaaaatctaatacatagttctcacagtctcagctatgtttaaaaataacatttgtaatatcttcatacaaatatttttaaagatccttttaagaataatctgtaaaaaaaaaaagaatgatagtgccgtttaaatagaagcgctctaataccaccgattggaaattaagtaatacactattctactttttgatcaaaatatcagctctgacatttattgttaagattgattatataaataatttaattctcgtatcagtatatggatgctggcgtataaatgcaaatttaagtatatatatatatatacatgtgtgtgtgtatgtgtgtatacagataatttttatgttaaccttacttaatttttctttttatctctttctcttattagcatgtcagtaatgctttctgaactttttacaggactactattcatgctactacttctactggctcgacctacattggacctcttacgatttaaaatatgttgtaaaggtggtgcatactctaatttgtgttgaaaagtgagtcttccattagtcacactcccgttttgaccactttcgccttcatgtttattatttaactcccgaatagcattctctgctgacattaatgttttatagaactcaattactctctcatgggcaccaactctcattttgttaaaattcaagacttgtaatccttctctagagactgcacgagataaagctacatatgcttgtcccttttcgaagacttttttcaagtcaactttcacacgaggcaaagtctgcccctgtgatttatgaatagataacgaccaagctaacaatagaggaatctgtactctagacaccaattgtttaccattttcatcttcaatagcccagtcttcaggttctactaatacagttcttgtggacatatcggaggttttaaatctaactaatggtaattttctttgtttggaactagaatgcaattctcttaataacgcttttttacggtttatattttgtcttgattctttattatcggactgctgatcttttaaaaaatcaaaaatcgtttcactaagaggtgtatgagattcttctggttcatatttacagtaggactccttgactaatttttgtctcactttaacatcatcatcaccatttaactcgttctcttcattatacatttccttcaaaactgtcggatctttcttgattgtctctaattgtccaacactgagctctgggtttttattcattgtctcataaaacatatacgtatccctatcaataaaatctataactttacctaaagacccattcaccaaggtggcatctacatttttaatcatcataacctgtgcaccaatctttaattcaagatgttttggtgccaaaaaattttgcagcaatttctcctttaattccacatcatctaaagagcccccatcaatagcattgaaattatgcactttccctggcaatttatttaatcgaattgaatttgctctatccacttcgtttctagtactatacaattctgcaggaataatatcatcatcaggaagtggtctatttaattttttaaattctttttcagtttcttcatcaatttctccaagtctcattttatttaacatatctataaattgggtatcaccttgttgtctaaacactttttgcagcattattgtgcatttgatcccagatttccatgcattagaatcaaatgcaaattttgttggatttgttggatctttggagactggtggtaattggaaaaaatcaccacagaatataacttgaataccaccaaaagggcgtggatttttcctaagctttcgggcaataaaatctaatttatctaataaatctccatccaacattgatatttcatcaatgactagagcactaatatgttctaatcttcgcgcatgtttctttgatcttctcacctttttgtatagttgctctgctgtgccttgtcctaaaccaattcctgcaaaagaatggactgtaacaccaccaatgttacaggctgctagtccagtcgaagcagtgacagcaacttggtcatatccatactttttttttagaactttaatcatttctcttaatagaactgatttgcctgtacctgcagaccctgtataaaaaatattgtgaccctgtttagctaattcaataacagattcttgttccttggataaaaatattggtacttttatttttgtgtttgctggtaatttgatagcaatgttatctacatcagtaaaaggcatcacttgcgtttgcaaagaaattttaccaccccattcactcattttttcattatgcataattttcagatcaggttcatcgatagtatctggaatatctattgtgataggatcaattgattcgaaagaatcattataagttggatttgtagtatcagtggttgtccgcgcagaaacctgttcactattattcattattgccttttctaaacttttgtctagatcttcaatagataaatctttcgcttgaatagtatcaagaatatatttgttatcagcatcagtatctaaacaatcttcgtctatctctccctcatctctatttgcatatatgctgttattactaaaatcctcaccgcttatattaattggcttcaatagagaaccagaatccaaagaataatccgacacattaaactctgaatttatagactgcgattttcttcgttcattttcttttgatgaattatcttcattccattttaatgtcggtaattgattcaaaataggtttattcaaagaagcatttattcgactcatagtttgactatggttattatcattttttgatctgtttgccctcttagataaaatttcaacattattgttattctcctccaacaatcgatcattatctatagtaaattcccaatcaccgtctgagtcagagagaatttccttcaaatcctgagctgataacttagtttttttaacaaaggattgggtatccagttgataaagcgtcctcttgtgtagcattttaaaagtattcccgactggaacaaccaatagagacgtatttataatactgaagcgaatattcagatttttatttatccgcaatattttctgcaaacactttccacaattcatgcatatatcattgggttaatccaactgatatatatatatatgtatgtatatataaagagagagaggtactagaattcacagaataataaaaaaacaacaatacgaacaggaagaaaggaaatataagaaacaaacagttacttatataaagaaaatggtagctaattaatataggtatatgaatctattggtaaaatcttagcctcgagaaaatgtagcaatttaccgaatacagaaacgaaccagatttgttattatcaaagatatatctattctttcgtttgtcttctgttattatcaagagtatttataacagcagttgtaattctattaacaccacttgagctttactgtggtatattccagttcaaaaggatctcaatttttgatcttggctctctcttctctttaccattattttgtctactgatctgccttttctcacgtaatttatcgaattcattgtttcttctttaagataaatgagcaaaccctcactttactatttaggacttgttaacttttaaattttttttttttgtaaatcttcgagttttgtgaacgcgactaggaaaacttttctttacgcgtcctttctttattataagctcatcgatagtcattgatcttcaaacatggtattactttatagatcacagtattacttcaaataaatacagcaaagagacaaagttaacattctatatttagcagaggtggaaaaaactagagggaaatcttcatttcaacaataatataatcttttagataagaaataacagaatcattcaataaataaataaataaataaataaataaaagagaatttattttgaatacaacttttcatatttctttactactatacgaaaatacttatttatgtattatgaaatttcatagaatactagtaagtcgtgaagcattaaaattggaaaatgtgctacaagcaggccaagcgtttcgatggatatgggatgaaaaaaatgatttgtatatgacatcgatactcattccagggcatgataagtatggtattgtaattctaaggcaaaaacggattaaaaaagaacaggatgatgagtatattgaatttgcttttaaacaccccacatgggagtattcttgtgttgagaattacttaaaacagtattttagattggaagtggatcttgtcgcacagttggaaaactggactttaaaagatcctaatttcctcaatatatcttcacaagggattagaatattgtcacaagaaccatgggaaacattgatttcattcatctgttctagtaataacaacataagtagaataacaaaaatgtgtcacaacctatctacttattatgggaataaaattggtaaattcaatgatatggaattttattctttcccgactagtgagcaacttatagaaaaggctactgaacaagaactaagagatcttggtttcggatatagagctaagtatattatagaaacagctcggaagatgattcaagatcaaaaaagattcaatgtttcaacagatcaggaggtgcttttccatatttcaaaaaattttagctatgaaaagataagagagcatttaatgggttatactggtgtaggtcctaaagtggcagactgtgtttgtttaatgagtttacatctagatcatattgttccagtagatgttcacgtgacgcgttttgcgaaaagagattacaatatagcggccacaaagactgaacttgccaaaataagagaatcatacaatagcttaaaccttcccataacaaagaagaagattaatccagaattggacttcattagacggaaattaacagaaaaatggggaccttttgccggttgggcacaaggtattttattctcaaaagaagtcggttctactgccggggccactgtggctggaaatgtgaaaaaaaggaaaagatcgctcgatgaagttgataatgtagattcttctataaaaatgaaaaaatcaattacagctccaaagattgaagcataatggtgacttagttgacttgatagatagtatggtatgtatttatctcattcaagcacgtaatatccatacatacatatacacatgcacatatgtatatatatattcattataaatatgtatttgaaattctaaaagaaataaagtaagactaataaatatatataatattaataattactcacatactattacgtctgtacaataaggatacaggatctataacacctgctgttgtctctatagaacctggaatatatggcatattattattctcgactaattgttgaaaaaattcccttccataattaacacctacttgataaatttcttcaaattttgcaaaatccaaagtgttgtactcatcaattggtggtcgtatgtatattacacctggtgtgtgctttgccttttccaaagcatttactgaggctacataacctagtctcatttgaatttcggccatgtttggaatattaggatgtgacgaaaatggattccacctgttaaaaataatccaaaacccattcaatgaatcaccataattcattggtgttttatcatctacagatccaacatcaatagcaaaaattattttacagccacgggccttcatctcatcaacaggtaggttatctacatatccaccatctaataacatagaaccattgtcttctaaaggtggaagcaaaccagccaaactcatggaggctctaatatatctccaagcataaccggaggaatgaatttcttgaactgattccgtaatgtttgtagaattacaataatattgaatccagaaatcttctattcttgtatctccaaaagttttccatattccacgattgaattcatgacctgtagtgtatgatgtcacaggccatgttaaatccgacagcattctccacaaagaggaaactcgaccagcaaatttcttaatacgaccatagattgggacgacatcataatcttttgcatagatacctcctatgaatgagccaatagatgttcctccaatgatgtcgattggtattccttgttcttctaatgcctgcaatatacctaaatgactaattcctcttgcaccaccaccacctaaaactaaaccaattgcttgaccagacaaaagtcttgctaaccttataaaatcatttttatgaaaatgaattggactataagaatgtttttttgctctcattagccttgatgtaaaaatgcctacagtatttttgattgagtcaggcagtagtttagaaatattgtatgctcttctacccagttctgtttgagtgattttatccaataaagatataccttttgtattcaaccatctatcatttcttatggtgttttttgccaacaagtctgtgtcaaattgaatatggtgatgggaatcaacccatggcctattagataaccatttacgtgttaatccaggttctacatatctttctccatgtaaaagaattaattcagttcttgctgaagttttcgatcttagtagcaacctctcatattcacctatttgacaacttgatttagcgtctgccaataaaaggatacaatccccttgatcaatacaagtttttgtccatgaagaatttacagctgtatctgcaatatatactacaagattataagtatgttctaaatcactgaagtaaccactttgcttcagtttaaataatttatcaaaagcgtgtctacctaaatgaagaagtgtagttctttgagttaagccaatagtttttttcccaacctgtttgaaagcatgaattagtttcatagcaaatgattcaacaggtagtccatttgtaattggcaaaatagtaatagttctataagtgatatttcttggatataattgagaagataaaggagaacccaaaaaattagaattatgatggtggtgatgaaatatgttattttccaatgaggaacttaagggaaaatcgttcttatgtcccatatctattaaggattttattgatgatgatgtcatagtagcaattgaagatacggaagaagacattccaatattagttacattatgttggttgatatctaataattttttaacaatcattctcgatactctaatcaatatggatggatgttctgtcgctagcaattcaaaaagtgatcttgataatctggctaattctgaatctctcacagccataatagtagaagacctattcatagcagttaaaacttcaacttctccaaagctttctccctgagccaactcaccaacaatttttgtaatacttttttgaccaagttggaaactttcattttttacagtactttgatattgtcttaatctaccatttaaaataacatatattccatttgcacgatcaccttgtctgaataaggtatctgaagcatttatatgtatccattccagagcatgatctaatttccacatcttaacagacaaattgttaattaaggattccacaattcgtagatttatggaatagtatttatcatatagaatttctaacatatcattagaaataaccgcaacatagcaatctgtctgagcaaataagttcacaaaagatctatatccaactaaggatgataagtagcctgccacaccaccagactccaccgtgtagatcaggtgttcagttaatatctcttcagcttctaaattattgattttattttcatgtgtagattgtggagacgttgtagaataaacggtaacgtctactttacctgatatcagataaaaaaggccttggctatctgaattttgttttacaattgttgtcccacttgggtaaaattttatatctaaacattgtgcgaaatcattccttgcagaataatagtccaaacttttttgtatagtgacatttcttgggtgtttacttttatgtgaagacaaggataatgaagatgaagaagcccttaaagttggttctaagggacttgttgttgtatcaaaagaagttgatagaagagaggagcgcggatatctgttctttttaataacggcagcaacacttggtataatattcagatctgttggtggaaagcctataacagaagatgatcttgaagacgggttactgttgtaagaataattagataacaggaagttttccttcgtgataccccaaaaattaaaaattatatcaacaagagccatttttaatactgaatcatcaatatcatttgaatcatccttgattgtattaaaagtagaattagaattagaattagaactatgaagaagtgtattattttgtgtcgtttgattacagtcgacagtttcaatatcctgatcattaagaattttatgattgaagtcaaaggagtcagtggattgattcaaggataaaggaacagagttttgacgttgtgaggacgggttaaaaccttgtataacattttttagcaaataagaaggtaattgtttattgtttttattatttaaagacttttcaatttgaaatagttcattggtcagacccaaataagagttagtaatttggaaattgacatgatacagtctatttaatattgtttgaatcaaatgagatgcatcctttggatacttcgataataatcttttaaaagcatgagaaggaatcactgcaatagtagattctactgaagcacgcgcaattaaagttggttgtgattctattatagggttaacatttgaagtaaataactttaagatgtctattaatgaagagaggggatttcctcttttaataatatttaataattgaaattttcccaaaccattgtttagccaaatatagtctgaattcaatggatcatactcttcttcttcgaaggtgatgttttcatcaactgaaaaagcactaaagttttcatttaatccagttggacttaaaatttcgctgttagttggagatgaagaaggaaaggatttgtttgtggaaaatgtggaagaaacattatgataaacttgaaaagacccatcgagcactacaattaacccaaggttgtcattaagcacaatcatatcccctgtatcaattttccttgtgtagaggttattaatcaattcttttacaacatgattatctagataaccgaagattctaatagctgaaatgatttgttcccagattgattgatgagtattggatccattttcagttttttcctgtcttttggtgttgtcgttaaatctgtcattgataaaatagtcgttattgttagatatttggtttttcttatttttgtttatagtatcgtcatttattaaatttgattcgttcaaatttttgtattgtgaaagtattttacttttcaaaaaagtgtatacaatatagagagaaaaggggataacaaaacatgtcgatatgactgttaatattaatttccaatgaataattagatatattgggaaaattggtaagcggaaagtaaataaaaataaaataaaggaaaagaagcggttaatagtgtacgatctttgtgtttctattaaatactcgggtaaaacagttgtaaggttattcatgtgttttattgtaagttactttcttttggtcttgataggatttattattatagaatgaaataaattaataataaaaggaaataataacaaggtatgtttaaaaaggataattaataaataaaggcaacaattttgttcgttatcattcactcctagtttatcaatataaattattattattatttattattattaaaaaaaaagaaaaaggaaaggaaaaaaggagagaaaaaagtgtcaaaaacaatttactttctattaccaaccctaatgttttagaagatactttatttccagtaaataatcacttttgtcaaaccctacaatttagctgtttgttttatcttatagaataatcaaaaaaaaagaaaaaaaattttttttttatttctgttaaacgaggtcattgaaagttaaccaccatagaaatgtatataataatagctgatataaacaaaaaaatacgaatgaaaaaatataaaaagggaataccactagaaaaggaaaatacaagattgttatcattattctatttttttgtttttttttattcataattgaaggcattcaattcaaatgaggaaaaagaatgagatagagatttatatctgtatatctgtatacagatataaataaaaaaagaaacgatattgtatgttgtcgtttctttttttcttttttctttttttttgttttaatatgtagtttttagtggtagaaatttttgtttccttgttgctatgggaacggtagagatgtgagacattacaataattgtaaaagtatataaagtaatcaattttatgttaatttagatatagtttttgcttacgaagtattctaatgtgtctttaatatctatataaaaatgtatatgtaagtatagtattatactaaaaacaagaaaaaaagaaaacaagaaaagaatagatttaataattaagctaagatgagtgctgttgttatgaatactgctgctgatatcacaattgctacaaaaaaattgcatgatatgaccattgatgagcaaaaacaactttacggaaatcaaccaactttgaatgtttacctagcaaatcttgcaaggagagttagagaggaagttccaaagggatatcgattaccaaaatccatgaagcagattcaatgaataaaatgatatcgtattattttttttttttcttttttcctttccataaataaatagtttacatagttatgtatatatatatatatatatattatttttgctcttttattattttaattattattactattattattatttttcttttctttttgtaatgcaatttgatttaatttacccggttctttccatgtttcccctttttcttttctttctttttttttcttcttctactttgatatttctttcaaaaataaaaaaaaaaataaggggggagggaggagcatgcggcgaagacgaaagggggtgagagagactgaagggtgaagaggtagagcttcagcttatcttttttattagcgagtaataataatatttaaataaagcagttttaaagaacaggtacatatattggtgtagtgctaaactcatgaagtttaagatatcttcataactagaaaaaaaaaaagtaaagaaaaaagaagactaaccaatatttataataacaaatctaaatagatcaaaaaaacatgactgaaagtaaaagtgctggtgtcacagaagatgcttcataccacacaggctatgaacctggtaatatgggtatggcatggtacaagaagaacttttctgaagaattaagacaattgggttctaagattaaaaagagtgtagaggcagggtaccgtctacctgtcagtgaaagtgaaggaaattcaaaaatgggccaataatttttacaataacgacagttataatgaccaattaatctatagttatatatatatatatatagacgtgtctcttatgtacagttctatatatatcttataataaaagtttcttagtttagtaagactatatatatgagcttaattatatgagcttaattaatgagtctcttttctttctgatgcacctttatgtacgaaaaacggcaatataaagtaaatttttcctatattgtgcaaatactatctttcaaccgtacaggtaatattttgtgtttgtttttgtagttcacgtgacaatgagaacacaattttgtttaccctctttgtttacacttccgtgcaccacatattaaaatcaactgtttatacaacaagtgtgggtgcacggatgtggcgtatttgtaatacatatttcggatgaaacaaattttctcttcactgcgggtttcttcctccttatcgctctttggattccaggctttctctgttagcggagattcttcatgtgaatggatatatggcttttttttcgtttttccacatttttcaccgaaagtatataagcaatgggtaattaacttaagcagggttgatctgttaacgagggggaatgtaacttttaatctgatcttcccttctttttctttcccttgttttcaccctccttacaagtctcaaaaagtacaaaaattacatatatatacatatatatatataaatcatttttttgaaatccgtaactctagcatatctgtattactaaagaaaaaataaaataaaaaataaaaaagaaagaaagacagactaataataataataataataataataacagattaataacaaagagacgaaaatgcagactgaagaacaaaaacaacaatacttgaaagaggtcagtgaagctgccgaaagagttaaacaacatatcaaaatacaacactctccacaattgcaaagacaacaacaagaaacatttgaaagagtgcctttaccaggtaacggtgctccaatgttggggttgaacgctacatcaggtagtgggtctactttggagatgtgggaagaatctgttgatcaaagattaagcgagatcgattcgaaattgaacggttccgatttgtctgccattttaactaaagatgatatggacttctaaataaaaaaaaattaagcatttaactgatcttttctctccacttcttcgttatttttttttatactttctttctgtttctctactatctttgaagttttacctttttttcatcataccaatacattcataaaacacatatatccatacatacatacatacatctgtatgtatgtatgtatatgtgtatatacgtatatacttccctttatttattcctatagtttgattttgtttgcatttaataaatacatttgtttgtttatcttccaatttttggctcgaggctgtttctgtaatccttcgttgtgcattcttaaaaaaaaaaaaaaacagaaagaaaaaaagccaagactgggtggtaaaaaatcccggcactaccataaaactaactattgggtgtacggttgttgcatatactgaatccgcttggtgtttttgttgttttccgcaaatgtatttgtgcggaaatatgcgggttttgctgttgatttttcttattcttttattttttctttctttttttctttttttcttttttcttcaaaggcacagcagaatgacccttttccgttttttggttttcatttctttcttcacaacaaaataaatagtgtattgaaatcatatatacagtctacaaatacaaagcatacgtatgtaggcgtataaagatacatctacatccatatctatatctacatccaaatctatacttgttgttcagaattaatagtttttttcctttacaacataaaaactagatatttgttagttgttatattatttccattactttttctccctccctccccccacacacgtatacataccccgcatccaccatataatctctacatatcaatacatacatatatttatatttatatttatatttatatttatatttatatttatattaatcagtttatccatatccaccaatagagtaattccttcaacatgaaaacagatgctgaaattaatactgaaaagattaataacgctataaaagtgatagagtgtaagaatcatgcaccagacatttcaatagattcttctaacttagctccctccagtcttaaaaaatctatcgacctcactaaatatacactggaaaacggcgaggtagtttccactataaacagattaaataataacgtcccaccaattactaattatattccatccgacgaggacgtgttcgaccccaagaccgggcttcctaaccacatcttcatcagagatcactttaagaaagaggggaaactgacaatagggcaagctataaaaattattcaaatggctacagatttactctcagaggaacccaatctgttacacgtacctgctcctgtcactgtttgtggtgatatacatggtcagtattatgatttgcttaaattgttcgaagtgggtggtgacccatcgatgactccataccttttcctaggtgactatgtggaccgtggttccttttctttcgaatgcttaatctacttatattcgttgaaattgaatttcaatgatcatttttggctattaagaggtaaccatgaatgtagacatctgacttcgtacttcacttttaaaaatgaagttcttcataaatataacataactgtctacgatgaatgttgtaattccttcaacgctcttcccttggctgctctgatgaatgaacaatatttctgtgtgcatggtgggatatctcctgaattgaaaactcctgaagatgttaatacaaagattaatagatttaaagagatcccgtcccgtggcttgatgtgtgatttagtttgggcagatccaatagaagaatacgatgataatacagatataaatctacaagaaaaattcatgccaaacgagattagaggttgttcctatgcatttacgtataaggcatcttgtgatttcttacaacggacaggtttactgtctatcatcagagcacacgaagcacaggacgcaggttataggatgtacaaaaatactaagactttaggcttcccaagtttgttaaccctatttagtgcaccaaactatttggattcttataaaaataaagctgcaattttgaaatatgagaataatgtcatgaatattagacagtttaacatgtctcctcatccttactggttacctgactttatggatgttttcacttggtctttgccctttgttggagagaaagtcactgagatgctcgtctctattctaaatatctgtacagaatatgaattggaagaagatacacccattattgaagatcaactaagacaaaatatcgattcaacagatcaagacattaacaaaacaaaaaacagtaaatctatattgaatgacgagcacagacggaaagctttgagaaataaaatattggcgatagccaaagttagtagaatgtactctgttttaagagaagaaagggaaaaggttcaatatttgaagagtatgaatcaaggaattttgcctcgtggtgccttggcacacggaacagattcattgaatgaaaccttatcgacttttgaaagagcaagaaaggaggatttgatcaacgaaaaattgccaccttctttagatcaagtagaaaaggttaaaaagaaaagatacgaggatatattgaaaaaagcaaatggagggaaatgattaattaaatatgtacatatttatacgtatatataatgttgcatttagtggtattagattcatattataataccaagtgatattattatttgacaattaatagttgaggaggtcaacaaagaaaaatcaaaaaactctttacagttactatatttattaatttacagttatttagaaatatttagaactatatatgcatatataaaaataaatattccttatacatttatgtttagagagaaagtgaatgtgcatattttgtttatatgtattgtgtgattcctgaataaaacaataaaaagacgcttaccaagtcaaagattagtgtttattatatcttttagttgtgtaaacgtttttcataggaatgtaaatcgtggacaccaccttctaattgtgcagaggcagttctgtattcgaatctgacgttacccttagcagattcttcttttaaagcgataagagatttaacaccaatatcttggcaggagtgttgtaaaccgttgtataagtatggtaaaaacttgttaatagaacctttgtcaaccacagcaccagatacaccttgagcaactaagactttgtcggattcagagaagtatctagaagtggaggcattacctttcttaccagtcttttgcatagcatcaatagaacccataccacgataaaccttcaatcttttaccgtctctgtagaagtaatcacctggggattcggtagtaccagcaagcataccacccatcataacacaagaggcacctaatgcaacagctttggtgatgtgaccaatgttttgaataccaccatcagcaatacatgggacaccgaattcttcagcaaacttacaaacgttgtaaactgcagaagcttgtggtctaccacaagccataacttcttgggtgatacagatggaaccagtacccataccgattcttaaaccatcacaaccatgttgaattaagttagcagcttgttctctagtagcgacgtttccagcaataacttctaagtttgggtaggtcttcttgatccattctaacatttcaatttggaagatggagttaccttgagaagagtcaataacaacaacatctaaaccagcttcaactaataaagataatctttctctgtcagttggtaaggtaccaatagcagcaccacataataattgtttagtggtagcagatttagaagctaatgggtagttttcgttcttcattaaatcagttctagataacattgagactaagttgttgttgtcatcgatgattaataatttaccctttttgatgtctcttaaaatttggttaccttcagataaagtgatacctttgtgaccagtggttaaatcggcaaattttgtcataatatcggagacagcaacactgtcatcttctaagaattgcacatcacgagaagtaaccagacctaatagtttacctgggaaagtaccattttctaaataaaaataaaataataaaaaaggaacaagaacgatctcagtcttaatctcacacaaacaatttttcttctattcatcataagggataatgacgatatatgtttatgaagatatcgtgtgatcatccgttaataacgaacattagacgaagaaaaaaagataatattcggagaaaataggacaatgcaatgttagtaacgatattttatcacaagaaaataaatgttggaaaagataccattctttcacacactatattattattacattgaaaatttaaaacaaaaacaaagctagacataagtatatcagagtaaaagttgtctacacgatcgtttgatcttaaaaaaatttatcagtagaacgaaagttattaatttttgaagttagatcatcatacatctttttgtatctctctttgtctttgaataataatgataataataataacacacgtatttggactgatcagtatcgagaaaaaaaaggtggaaaaaataggaaaaataacataccagtaacagggaacccagaaaaacctaattgttccttcatggctttaacttcagcaacagtagtctctggagggatgacgactggggcgttgataaaaccattttcgaaacttttgacctttttgaccatagcggcttgttcttcaggggtacagttgtggtggataataccaataccaccattcaaagccatgtagatagccatttcagattcagtgacagtgtccataggagaagaaacaaatggagtgttcaaagtgatcttcttggtcaatttggtttgtaaatgaacagaagaagctgggaaatcaacaaaaccaggcaagactaagaaatcgttataagttaaaccacctctgacatcggaatccattaattcggaaacagataaaccgtccttctttttaaaggtttccaagtattctaaagcggttctataatctctcttagtggcaaccattgctagtagtaaatgtgtttgtaccttgttttgttgaaatctgtcagttatcttgcgattgggtttttgttaactggaaacaagactaagacacaaaaaaacggaaataggaagtaaaatacacaatcaaagagcccaatatggtgaaaaacatcggagcaaaagcaagccccaaagatttcccccagttgtatgatacaaagatacaaagggagaacgaatgagcagggtgagaaagaggagtgtttgacaaggtaaaagaagggaggaatagattacggatcaataggtgttctgagatctgttgatgggaaattcattaagtatttatagtttttgattctttcaaaaaataaaaaaaaaataatagaaaaaaaagaaaaagaaaaagaaaaaattttctaataaatttcagctcatcgcaataaaaaaataaaaaaataaaatatttttcatttttctttgtgtttttttttttatttttgtcacccctcgagaaaaaagaaaaaagaaaaagtaaaagaaaaagaaataacagcaaaatgaacatttccaaattaggcaaattggtctagatcaagttttgttaagcagggaggaaaaaaaaaataaaaaggaacaaaatttcacttctgtttttgttttgttttgtttcttttggcggattttttgtataattttgatataacgaattcttgctagacagagtcaaaatgaatattctccccttttcctcatccccatcatagaaaacggagtctttgaagaaatatcattagggctagagaacattttatttccatttggcgaaaaataatatatagtagaaaaagcctaaaacagtaagtaatatatatatatatatatattcaataatctaacttaacaaagaaaacattactgtgaatgatggtttgtctaaaatgtttatacttaattcaggtataatttgctaatgaaacgtgaagaaggaagattattttgtgtatttgatagtataatatgttcattttgaaagatttagatggatatatctcttttttttttgctattttctatgactcaggtcttctgaaaaaacttttttttttcgtaaaacacacgaaaatctaagtaaatctgaaaaaaaaaatgaaaaatgaaaagaaaacaaacactgtatcttctttggcaaatttaagggtaaatgaacggcttggcatacctcgttaactgtgacaaaaaaaatttgtcatgtaaggaaaaatctacaaaatatagtggaggatatcttagattatctaatcttcaacaataagttttcatctaatgtacagtagaaaaagtacaagaaagaaagaaagaaagaaagaaagaagaaagagaggtcaaattaatataacccatgaatccgtcactaatttttggtttttgataaagaaatcaaagattaaaacatgattctatagtaatattaatacccagttacatttgaggatttaatttaatccagtatcaatgtatgcacatatatgcatatatatatacataaaggtatgtagaagataaatatgtgttacttatagtaatgacttcgtttctgaatctatatttcttggttcttgtaactaaaggacacatggtgtctggatgcgagggatttacaacggctttgtctctgtgtatgcgggaatgaaatcattccggcaattttatatggataaaaaaatacaagggaaaccgcatattaaaaccgcgaatcatccagtaatttaaacatgtcggaattttatttagcaataacggattctttcgttatcttttttttttcgtttttctcttgtttctaagttgtttacttaataaacgatggagatcttcattagtttcaaattctacgtaaaatgcacaaggctaagttaattttttatggagaattaaaaaaatgctaaacataaccatattttatatgcagatacatgtatacctcgacgatttttaggattatcaaggcaatcttggtttgctaatagcttatcattgttgttgttgttcttttttgtcgtctagatttaggtataagaagtaaaaggaagggaaacaaaaagaccaaatattcatatatatatatatacatatattaatattaaaagtgaataatgactaaaccagtcaatgtgtattccatcggagaagtagctcaaagattagatgatgaagttcctattgtttttaatagattggggtatgaacaatcttttaaattgattgacatgaagttatttattggttattcaattgctactgttgctggtgtcagctttattttagataagaaatttggacacaataacgttattcaatatcaacgtatccttgtcataatatatttcgttttatcgtttatattttggtatttcaaaaaatttgtggaagcttctaccctgtatattgggaagaatagtaaagaaaataccaccatagtattcaagagagattataaagaagctgttccaatatataaaactgtttttatcctaaaggatcaacaaaacgaatcgaagagttcaagcgttgagttgcaggttaatcatgttttcaatgaaaaaggctatttacaaactgaattgtttttccaatgggttaaaaaacaagtagaaaacatggagtcgaaaaaggattaaatattttctaatgataagcttcagtaactgttatttactcgtcttctatttcagtttaatattaatacacgactatatatacatatatatatgttgatatatataatttcattcaatctaaattatcctcgttgatttctacagtttgaggtggaatataaacaccattatataattcatcctttgcaacacttacgtttctattctttagtgcggaaatatccaagaattcaggtcctaattctttaatggatcttgccccaagtaatctcatattcatttctaattcatttttcaagatttgaatagcatgagctacacccttttcaccataacaggaattggcataaataaatggtctacctagaccaacacctttagcaccaagacataaagcttttaatatatctgtcccacggcgaataccaccatcaatgaaaatttcgaaattcttgtctaatccattcttcatcaaaattggttttgcttcagccaaaacttctactggagaacgactaaaatctaactgcctaccaccatggttggaaatgacaacaccagcacaacccatttgagctgctttaaccacatcttcacttctttgtacaccctttatgatgataggtaatttagtaaacttttgtaatttggagatgtcatcccacgtcaatgagggatcaataaatttggagattgctcttgctgcaccgtggtctgtttcatttttattatttttagccatcacttcaggaccattcatttgcgttgagaatttgattttcaaatccttttcacggttacctaaagatggggcatcaacagtgacaaacagagctttcaaccctaaactttcaacatgcttaaccaattcacgagtaatttttctatccgagttaacatacagttggaaccattgaatttgtcttgaatcgtcacttttagcatcaacaatttcatctacagaacatgaagctaacgtggagatcatttgtggaactttccaaggtgataatgcacaacccttggtgatacctatttcaccttcttgtggattacctaatttcatcaaggcggttgcactaatgtagaatggcaaatccacttttttacccaacatctcagtctctaaattgattttactgacatccacaagaactcttggcttgaaaaagattctgtggaatgcattatggttttctctcatggagatttcatcatctgcaccagaggaataataagcccatgcttggttagaaaggatcttagaagccaaagtttcgaagtcataaaggttgatgatattgtttatggttggtagatgctttcttaaattttctttataaataatctcttcaggtgtttcacctggagtgtaaggtggtgcgactaagttatcaggcatcggcccagtcaattcacctacaaaccattcaggcttaatatatttttctagtgtaccttttgcatgtaatggtttaaaaatagcggtgacgtccataccggcgttcaattttagaatcaaaggaccacctgggtggatgtctataaaatctgttaaattgtaaactttaccttcgataacgacccagcaatcgtctggtgtattatgtttagctacttcagttggagtcacaaattttttgtttggagacatatgtaatcctgaatcattcaatatgtctaaatcagcattgtctttattcaaatataaaaaactggttgcagtaacgattgcagctgaggtcaaagaaagcgtagttatttttttgttatttggagaagaatatgaggaggatgaggaagatgaggaagaagaagaagaagttttggtatttgtaatggatacgaaagttctgttatattgtttaattatatgtgggaagttcttcttcaactgacttctacttataatttttacagtttgtggaatcatgttatattcggtttatttttgctatggtggtttatgtcagcaagatacatagtcaggaagcggaaaatagcaacgaaaagtactgtgttttttccctcatttttaactattcaaatcttctcttggaaccaattaatcaatgttcttatatattattgcgttcgtctgtgtgtgtgaagtaattcatttattatacgtctgtgtttatggtataagcatgattttttgttaaaagaattatctttgaaatttgcaaggtcagattacgtcaagcaagtcggcagatatctacaactttcaaacacaataagaaaagaaaagaaaagaaaagaaaagaaaagaaaaaaataaaataaaataaaagtacagttatagagatctgtattatctccattttgaattgatctcgattcattggctcaattccatcttctccaagtaattaataacgcaatcaattcctgtgcgctttttttttgtttgttcgttcattcgattgaaagaaaagattacaaaattaaatttaaagtcaaagtcaaataaaacaaacaaacaaacaaataaaagataatgtactttttttattcacatttcatttaggcagaagaaagtcggactttcgcatttcccaccggctttaccggatgtaattgatctttcttagaattttatatcatttcgggtttttttagggtaaattttttctttttatttagtttttgttgttgggggaagacggggcagttcatttgtttttttcttttgctggtggtggggggggagggggaaggagaagagtgcgcaactgtggcgtggggggagtagagtagaaggggaggagagtagaagtagaaggagaaagttgataattcttcttctttaataaagggaacaaccttttttttttttggggtttgaaggtcaaattggacccttgcattagttcagtaattgttttttctttgttttttgtttttttttctttttctttagtttattcgttaaatgggagataaaaagttgaaataaagcatacagaagaaatagatagaatttttgaatccgatgaatccagtttatattgtgtgctggctgatattccagatggagattaaatgttgttgctgatgtgttttttcttacaaacttagacagtcggaaaatgcagttgcatccttagtcaaggggggatggaagatgtgtaatattattatattaaaaaaaaagtgcttctgaaatgttggcaactaaaacattttgaccatctaattttagtatatttgtttgtttatacaattgcatgttaccagtatggttgtttggcaagaacgaatatggccttttttttaatttttttcgactactttgctaataagaagtagcaataagattttgttagtttgcaattataagatgtggaaataggcacgttgttttgattataaatgactagatattcaccgttacagttttctcaaaagagtaaaactgttggttcatttttttaaagttgtttttcttttttttttaattgttagtattaattatatattcaatcaattctttaatttttagtatcttgtaatataaagtttatttggtcgatatatatgataatacaattacaaggggttttttttttcttactcaataatacacttacttttggttgttgtgaaataataatcatgtaggcgtttccagaaaattaactaagatttgtacaattgaggaaaccttttttcttttttttttatttttaggagagcagtcaaagacttcagaatacaagaaagataattgaagtaacttgtccaaaacagagaggtgatcaaaattccaatcttatatactgtaaaaaaaaaaataaaaaattaaaaaaaattactgttagcaaattaatggaacaattcagaaaaaatttttaaattagaaacactttgatctacggaatttgacaaactgtttttgttgagaatgagcgcctttattcattggatatatagtaaacattctcaatattatattaaacagatttagtatacaaaattataataaagttcttcactttctttctttatatacaacatagaaataataatatagaaagattgtaaataagataaaaataatgtatgatgaaatccttggctttatatatgttaatattcagccattttcctctacgaacagtaagatatttaataaataaactcaacaacttttggtgacctctcaacaattattactcaacaatttatcgtttagtgtctgctaaaatcttattgttctatctattttatcataaaacattctatttcaacagttttggataagcgtaatttgattttccatattgttaagaaatgggagtttattattggcatttctataaaagaattttttatagtttagttttcttacatatgatgtggtatatagagatgccatattatgtgggaaacattttattatttttttttttttatccaccaaaactattcttagagattcgaagaaacaaaaaatttaaaaaaaaaagaagtgttgaaatgaataaaagagtttacattacatagaacaaaaaacaaggattcataacttaatggcttccattattaccatggacgttacgtactcgaacttcaaatagtttacaatcaatacatgctttatattaaaaggaagagatatagttaaatggcagattcttatatattgaaataaaaaaaatggtttaattcagtcttaatttgcctatagtatatttgaatttactaaatattaaaatctctagaaagaagtcatgctgttgtaatatgagatggtgagattctttgtgtcttccagggaagcgcaaataatattaatagttattcaaataatcgagacagtaatcaactatagtagataatataattactaaaacggtcttatatattgagcggcttatatcgagctaatatatttattcgaagttacttgacttgttacttgcttgttgttctctttttgttcatatataatatataaattatttacaagaaacggttatggaagatgatcttttatcttcagaaaacgttgtccttttatatgttttttggagctcgatcgattattcagattagtacattaatgacttgactgattcaccctaaaatttattatattaatttaggtgcactactggattagaactgcaccccaattctctaatcatggtgattagtaatacacgtgggacttattaaaacaatagataaattctacatttgccaaaaatcttatgtaatccaatctcttcattatgcagcatctaatgttgtagcacgtgtatggcttattaagacaataaatagttctacattcattcaggatcttatgtaatcttgatggttataactatcctattccacaacatattttgacgagtaatgactccatggccaagctggttaaggcgtgcgactgttaatcgcaagatcgtgagttcaatcctcactggggtcgtatggctttttttttctttgagaaattgtgatacttctgatattattgcttagggctttgtttagaaaaatgagggttgacaatatttttctaaactttcctttttgcaaaatttcacaaacatacataaaagcaggagtaaccaacataagcacaagagtgcaaccaaaaagaataaaagaacaaggaactagggattaaataagacatatagatatataggaatgttacgtctagagatgtagaaagaatttatatcttatgtttatccaaatgaagtattattgtgatttcaacaagattgcctgttattagaaacatgtaaccataaggttatcacaactagtaataaaagcaaaatggtttacaatgctactatgacaatatgcatcacaaaacatatgtaatattgtattatctcttgattaactgtgtatattaggaatgatatcaataaattaactacttgaataggtataagtacaagctcgcttttcatctttagatataaaggacagtgtaactctaactagtctaccaaatatttctaattcaattaggtattatatatactatatacattgttgtcttgaatgtctcttgttgttttgttggttcattgcttacatctaatttgtggatttatagttttatatcaatagcttcttactttttttttctttatgacactagtatttttaataagtctcgaaatgcaatgccaatttattgaagaaaaagaaaatttagaaaaatccctttgcttaagcttgaataaatgttctttaatgttatatatttgttcttaagataaattcaccttgctacacttatttgaattgtctagttataggtcttaacttagaatctagcatatatgtaagtaacagataatgtaagatgagcaattgagtttgtttgttcatatatgtatacttgcttctccatagatctagtgtagtttgttgttgaagaaagctctatttttgttggagtttgtagaaattatagattgcaaaagtttaccgttgaatcaggcagaataacaccaatattatgaagtgagttataagatatgcgatattgaaaatttttttttggtaaatttttttgcttaatacattactggatagtagttactattgaatgttgtgaagagagaaaataatttaattataaaagctaataaagtaaaaaatttattattatagtacatagttaatgaacatttgataccaatgacttgaaattctacatgattatacaacacgaattagtcttcttagcttgtttataaaacattttggagctggcagttaaagattcagatttatcaactaaattgtctagtttctcccctctttgtaacacattctctatagttttatgaagaacaatcttagtttcatctaattcctgttgtactttcataatagcatcagcttgagatggatcttggtatttgctgatgtatggttctaaatctttcattttcaacgattcgttagtctcagttacagaatcccaatcagctggagggtgggctactaaatattcatctaaaattttatttaataaagtatatgcaggtctaactgggtactctttatctgtgattaaaacaccacatatcccttcggttcttgcatagacatggccaacatagtttccttcttctacactttgtctttgtcctgcagaagttcttgtggctacagtatcagcaaagaaagtcatgaattgaccaacactgcttctttcaaagaaaccaaattgggaaagatcttttacttcagtcaattctaatgccttttctgtattattgcgaagaataccaatataatatattttcattttatgattgttttttttttgttcacttatatgtatatatgtgtgtgtgtgtataattaggaatcaattgactcaaatatcagtttacaatggatacaactctaggtgctgtttttgtttgaaggtcctttattttcaaatggatgatttcttggtcattctacttgttttatttcattcataatgttggtctcttaaatttcaacacattcaagaagatgaaaaaaaaaaaaagagagagagaacaagataatgaagatgcatcgataaacaaggaaaaaaaacaaacaagttttttgcaacatagttacaatgttctataactaaagggtttgaaaaactgctgagatattcaattttaacccaaaatgtatctacattgcaataacagatttatcgttactgcttaaaagggcaataaattttaaataatgttatttattgcaattataacagataaaaattagaaataatattcaatggttccgataaaagagactttaattgttttgcaattactctaggtatagtagacattctgctaactgtttatttcataattccaaagaatactgatacaaatgattaccaaaaaaaatggaaataataattttcagcagcagaagcctgtcataatcaaaaaaataattataactgttctatctaatgttgtaacgtctgaatctctctgattaaattatataagtgaaaatttatgggattaaagaagagtataaggataaagggaacaacttttataattgtagtagtggctgtggtacaatagagtctcaatttcataaagatattaaagcaaccaagacaaagtggataatattaaattagacgaaaatgtcatccctggatatattacttttgttactctatatagaggtgctttgtatcatgttttttaagaaaacaatattatttctgataagatatttcctctaataggggaaattgatttaaataataacgaagatgaattggaaacccttgagtcatttagtggaaacgtttattcaaatagtggtatctatattgatgcataacataaagcaattcaaacagataaggaaacattatatgtgacatcttggtcaattcaaatcaatgtgtatattaatacagctcaatcaataggatctaaaggtcttggagacaatactggtattgctgaagcctttgttgaaaatgattttgaaatagataacagataagatctaagtaatagaaaagtgtttgatagtaaagaaaagaattttaatactattgaaacccattaggaacttgagaataatatattaaataatgtgaattcagtttgttccatagtttaggctgaggatgaagaacagcagtgacagtaagaaaaagattatgattctgacagtagaaaggtcaattgagactgcccctgttttggtaaaatggctcaaggtccctatggtggagaattcaaagtggtatgctcttattttgtttgtttgaagagtgattcaagagggaggggaggtgaatatgtaaagcaatttagagtaaagaaagactattttgaaaggaagactgatattattcaaatgaatatagtaatattaaagagagtgtggtgacagtaagtaacaatagtactacagcatgaattgtaaaaatattaacaaaggtcattgtttttaatgttaatattcacttcatataaccatgttgggaatagttcattatttatataaagtgtatgtttatgtacttgtgtataatatatacaggatttgaaaaataataattttttgttgcatcagtcggtagtttaatcactgaaagctcctttctaattcacaaaatttttcgtagatttcatcttctgttaattgatgtatggtcctatcttctcttgttctcacgctaaaagtgttattgttagcctcattttcaccaacaataattaaataagagtaatctttatataatgcatctttgattctgtagccaacagattctgacctttcatcaatatcaacattaaaacaatgactattgaatggcattggttttaaagtatcactattatagtcattaacttccccacacaatcttttttttaactttctacattgatctacttgttttttattgtcggtctttataggaataatcatcgcttggcatgggttcaaccaaaatggccattttcccttataatgttcaattaatagagccataaatctttcaatagaaccaaaaatagctctatggatcataattggcatttcatattcattatttttatttttaaattttaaattaaatctttgtggtaattgaaaatctaattgaatggtggctacttgatgttttttgccattatgatcaggtaccataatatctaatttaggaccgtagaatgcaccatctccctcatttaattgccatggtttatttattttcttgaggacggattttaagacatcttcagcatgattccacacagatatgtcaccaatgtaatgatcagtaggtctagttgacaagttaatagtgtaactcagtgcggaatcgcttgttttattaaatttaaacacttgattataacaaagatctaccaatttcaggcagttaactatttcagattcgatttgttcctttgtacagaagatatgaccatcatcttgatgaaattttcttaatcgtgttagtccacttaaagcccctgaggcctcatttctatgtaatggagagaaatctgtgtatctaattggtaattcttgatatgaatgatcaaatctgctaaacattacacaatgacctgggcaattcataggttttaaacccaaagttttcttggataagtcgatcccttccactttaaacatatcatcttggtaattttcccaatgaccagatctttcccataaggattttctatagattaagggggttatgacttcattgtattggaataaagattgttgttgttgtaatttcataaactgtaccaatttattgaatattttggttccatttggtaaaaaaaagatggaaccaggggaaacagggtctgttatatacaatttttgtctaagagcaatatcttgaatcaaactggttggatttgagacagagtttgtcgtatgaggagaagtaatctttgatttagttgttagaaaccttctattgagtatcgatatttgatttttacacttcattcaatttgttaatcttctatttgtttgtagtgtgccgtaatgtacagtagagtattgtaatattatttcccttatatataatattctataaactattatttgagagaatgaaatgaacagctaggtaaatagacattactacttcatttagttcaactttgaatctttttcctctcttcctatcctcccctcccgaacaaaagactctcttacggcaaattaagaaaaaataaacaggtatgagcacaagaacataaaaataagtcatattgaagtgagttataaaggtatgtatatatatatatatgtgtgtgtgtgtgtgtgcgtttgtcaaaaaaaaaatagataaataaatttatttaaccagatatataagtggcatctattttttgtaaagatggacctaaatttaacatcaattttcttctataagaagtttgattgtttagttgtatcggattaccttctaaatagatggtctctaaattaggcaaagatcctaattcttgtcctagggattcaaaactttgatcaattttattaaacgatgcccataaatcagtcaaattggttaaatgggacaaattttctatcctggtaatacgatttgacgtaatatccaatgtagtcaattttgtgtttttctctaacccttcaatggaagttatgaaattatgagatagatataattcttccaaatttgtcaattcttctagcccctcaattttatgaatcttattactttgaattgataaaatttttaaagatttcaaatggtgtaaattaattaaccttgggatatgatttttacctaaccaaatttcttgtaaatttgttaacccttcaagacaattttcaccaatatttgtaatttcattaccaccaagttctaaatttttcaaattgtgtaagttattcaacccttctattcttttaattttattttggacaaaataaagattctccaactcttttagattatccaaatttttgatatgtttaatattgttgaatgaaaggtccaaatttttcaactgaactaagttgttaacatacttggaaatatgtttgattctattatcatagaaatcaaggtcttctattgtattcacaggtaaagaatccacctcactgatactttctattagattttgtctaagacatagactttttagtttggtgaaacgaatcagattcaaatcttctagagctttaatctttaaatgtaccaaattgatcacctcagtatcatcaggcaaatccgaagttaaatcagaatctgctgaaagatattcaacattattgtctggtaactcttgcatagataattgattaacacctttggaaatctgagaatcctgttgattctctttattatcttggttattttcactggacattaagacaaatttggtatataattattaattaggattgtataaaaaattttgttgatactattattgttattattattgttattattattgttattattattgcttattattattgcttattattattgcttattagcccttcgtaaataagcaataatataatgcgaaaggagaactataagtagagctacaagtatatatgaagatatattttgtatgtatgtgaatatttgcgtgtgtaatccatctttagtggcgaagacagaggaagaaagagaaagaaaaagaggaatgtgaatgtaaaagtggatgtgtgtttaagaattattacctgggttcgcccatacaccacaccagagtgccactttattaattgtttcaaccattttgaaccagttgatcgaccactagtaataacaatcaatgggttatggtgctttggatggattttatattgacgtttatccaattgctttgtaaataaatcaacccaccttagaatatgtggagaaatatgtaaatacatctttaaatgtatacctctgtatgtttgtgtctattactaatcaactattactaatcagagataatccagtaactttttcctaagaagaaaaaaagtaattttggaagaaaaatgttgcaatggaagtgaaaccgaaagcagagggaaatgtgatgggatgcgatgggatgagacaagatgagatgggataaaatatataacatgtgtatgtatctatattcttattatttctacccctctctcctttttctttcttttgtttatatgtattacaacattttcaatggaaattcgtcaacaaagaaacgaggaatatagctcacacagatttttatgatggatcaagaagattctattccaattgtcccagtagcagtctccacagctcaaacagaaaatgaattcacatttgataaatttgatacaaaaattaaggatcggcaattttatcttggtgaatatgatgaaaatgattataacatcctatctgataaaataacacagtactattccttgcctaagttaatccgatatctaaaggacaacaatacaaaatttcacaatatcactttacaattcccagattctttaatcatggattcgtcaatcatagtaaacgttttgcagaaacatttccctagtgcacaatttcataaagaaaatatagggctaggtgtgagtgaccctgtggattctaatggatctccaattagaaggttttggatcttggccgataccgcatacagtgcatgctgtgtagatgaaatcgctgcagaacatgttaattcggatttagttgtccattttggtgatgcttgtttaaatgctattcaaaaactacctgttgtttatatttttggtcaacctcgtttagattgtgacaaacttattaaacagttcctcgatagatatccaaataaggatgctaaaatatgcctgatgtcaaatgcaccatatactattcatctggcgaagatatacaatactttggttaatttaggttatttgaatattgtatatactcaaatcaataaagatatggcaggttcaaatgccgtcataatggactcatcaaatattaatagcgacaatgtaaatgattttgaagttaaagaagtttatactttaggtaatagaaaactttatggtaaatgtaacattatcgaggatccagcggaattacagtcatcttttgaattattttatatcaccatcccacaagatccacatttactatacttgacaaccactttcaatactgtcactttatatgatgtggaaaataactcgattatagatagtgcatttccctcattaatgaaacgttataggtttatgaatgtggcccgaaccgcaggttgcattggtatcttaattaatactttgtctttaagaaatacaaaggagactataaataagctgattaaattagttagatcaaatgcgaaaaaacattatttattcgtggttgggaaaccaaatatagccaaattggctaattttgaaccagtagatatctggtgtatccttggttgtggacaaggtgggattattattgaccaatttaacgaattttataaaccaataataacaccatatgaattgacattagcattaaacaaagagattatatggactggtaaatgggttacagattttgaaaatgcattacaaggacttacaattgaggatgatcaaaataatagtgacatagcccctgatagtgatgctccagaatttgatgttgttaccggtaagtttgtttccacatcaaggcccctaagagaattaaaacatttagaattagaatctcccttgaatgattctggtgatttggtgaaaagtataagaggaggtgcagttattaaaggtactgtttcaacttcagcaacaaatttacaaaatagatattggagtgggttgggtagtgattttaaaaatgatgaagattatgatgaggatggtgccattgtagaagaaggaattattggtgtcgctcgtggatatcaatttgaccgtcgtgatgcaattgaaaaaaaccaacaatagttttaatgatgtaaaaaagaaaattttctattttcattatattgaaatagagataaaacaaaatatatatttaattggatacatataataatgtatattttatttatttggaattgttgactgtcactttggaatatttctactattagcgaaaagatatatatggagtcttttgcactaagtatcaatatacactcttttttattaatgataattgataatgttgatgcaaggcttctgaatcaaaaattctagtagagttcattttagactaatataataagataatgtaacttacaataggatattggtagtattataagttttattgttatttacagtagaaagttagtggtactataaattgttattgtattgctttttctttttctttctagataattaatatgcaagatacaatattatacagtatactcattttatcttcgaatcttctttaatgtaaattttcgtaactttttatcacttagtacagtgaatttagattagcaaacataactctaatcatatttcaacaggtaataagtgaatctgcatgctttcaaaagattttttatacaatttaactctattaacaaacaaatctgttgaaatagaatgttctataatgaaatagatagaacaataagattttagcagacattaaacgataaattgttgagtaataatcgttgagaggttaccaaaagttgttgagtttgtttattaaatatcttactgttcgtagaggaaaatggcttaatattaacatatataaagccaaggatttcattatacattatttttatctgatttacaatctttgtatattattatttctatgttgtatatagagaaagaaagtgaagaactttattataattttgtatactaaatctgtttaatataatattgagaatgtttactatatatcccatgaatacaggcgctcattctcaacaaaatcaatataaattgctttttttttacaatttgtttattacggtaacctcctttagaggacgtagataaaacatgaaatacaaaattttgtaacaaactataatttttacaattcaatctatatataaactaaactttaattctttttcagtacacaatttatgttatttcaataataatagttatttttctgttaattaaaccaatatatatttcaaatattcaaactaaatcataataaatagaaacaactatacaaatacaggaaattatggtaaagtaaagtagtaattatacaaatattatcacagcaaaaaacactgatcgtatataccagggatacaatatgcaatttgaaaacaataattaatataaacagtaaattaattactaaatggtattatatacaaaaacaacgtagctttttcactgttttactctaattgtcttatttatttatctatctatttatttatttatatatgctttataaattatagaaaaaaagataaatcatagaacatgaagtaacaatttataaaatgtccttttatatgttctccaaacttgattaaccctctaattggatgtattaatggataaataaattatacacaaattaatttacaaagtatatactaccatatatcttggacttcctgttataatatgatgtggtcagagttttgtgttattcggggaagcgctagaaatatcaaacgaataatctattagtaatcgagacaataattgatacaatcggtaatgcaattattaatacagtcttatatattaacggctatatcgagcttatataattatactatttgcttattgtattctgcgttcgatgttcgttggttgttttgttggttgttcgttatatatataatatatttaaattatgtgtaagagaggagtaacagaagatagttccatctacagaaaacgttgtccttttatatgttttttggagctcgatcaattattcagatctgtatattaacgagcttagtgatccaaaccctaaattttattatattaatttaggtgcactagtggattagaactgcaccccaattctctaatcatggtgattagtaatacacgtgggacttattaaaacaataggtaaattctacatttgccaaaaatcttatgtaatccaatctcttcattatgcagcatctaatgttgtagcacgtgtatggcttattaagacaataaatagttctagattcattcaggatcttatgtaatcttgatggttataactattctattccacagcatcccggcgagataattggagggttggccgagtggtctaaggcggcagacttaagatctgttggacagtgtccgcgcgagttcgaacctcgcatccttcatttttgctagtttttttggaaaaatttttgactaaattaccttggtaaaaaaagcaaagaaccatctatacatactaccatttgtttaagaagtcatagttgcacaatcattttttagaaaataatataaataacagatcaatgaataatatgtcaccaaagaaccataatattccatttagcacttagttttttaagtttgtttaaaaataatcttgcaagatagagaaactcattgaatgattccataaaaccatttcactatataattaacctatcatatatattgctattaacttcaattatcttattaaaacaaaaaaactaaaacaaaaatatgttcaaaaaatataaaaaccaggacttagatatgactttttggtggaagaagaatccaaagacgcctattgataatgtcaaactacttatagaacaactttccaaaatcaacactgcgtctactattgataataaaaagaagttacaaggtgaatgttggaactatttgattgctatcaagttgtatactataggagaagcagaccctaaacctacacctgaattaatagacgaaatgtttaaagaaatgcataatttagatttattttatgaactattggagcatttcactgatttagaatttgaagcaagaaaagaaattgtgttactttttgccatatgtttgaactactctaaggataataagtttgttactgttgattaccttgtatccaaacctaaatcattaaattatatgttacgattgatggaatcctccttgcaaaaaaggatatctcctcaagatctttttttgcttgttggtaatatggttcttgaatgtgtgaaatatgaacaactgaatagaataattctaaaagacactcaattatggagatttttccaatttgctacaataaataactttgaaatcagtacccaatcattacaaatattaaattctgcattaacagaacaccctaaattggtatcccaagaattcttttccactgaaaataatattactaaatttattctaagtataaataaattaattgcacatggatcatatgtaacaaagagacaatccactaagttattatcatcattaatattaagaaaggctaacaaccaattaatgcaatattacataaattcatcagacaatttaaaattgatcatgactgtaatgacggataaatcgaaaaatcttcaattagaagctttccacgtattcaaagtaatggttgctaatccaagaaagacaaaaccagtgtttgatattttaaccaaaaacagagataagttactaatatatttcgagaaatttggagcggataatatggatcaaacatttcaagacgaaaggaattttatcatacaacaaattgatgggttaccgaggttagtagtatcctccacaaacaatgaaggtgtattaaacccttcgctttcaattgtgtctgcctcatcatctccaattcaaaatacttaaatagtaaatacaaattaaacaatttctttatttattttttcgcatatagcataattaaacaagcaatcaatattgttccctatatattcatgtaggtttttcaaaaaaaaaagaagctttttttcatttttagtgttaaattaagctgatattattacttttaaatacaaactttgatatgaaactgaaaaatcatccagcagaatacagtatatattccagacatttacaaaatcaacttttcaagtatttgtaattattcaccgactttttttaagttgttctccatccttcatcaaaatgttcttttccttttttgctttaactctttgattctttaaattttgtttgttaatatttggattattcgatgaatttgatcttaataattgaactgtcgtatctttattttccttatttgtgattttcttaattgggataattggtgtcacagatcttctcgacaagaaatttaattcagtttcagattttttaatgatattagattttctagctattgttaaatcatttagacgtttcttccatataggaacttgctgttctaataagttattaatctcaattaatttttcttcattttttaatctttctacagggttaaacggtccaaattgatacccacattttccatcaaatttgagaagatagttgtggaaatgccataaacttgttctgtgacacacggagattagtgatattccaaaattctgagcagttttatacattctttgttccatctccggggagactgcagaggtgcattcatctaatacagcaaatttaggtttatgataatacattcgtgccatggctaatctttgttgaacaccaattgacagtttttcggtccagtttctacatagatcaaatgcctcctttaaatctacagataaaggtgtttccatatctgaagttaacgtagatacttcattaactacatttttagattgatttttggccaataagatagacatattttctgtaatcaaatcctttaaatctaataattccaatatttttaccaattcatcatcccctttagaataatcacccttaaatcttctttcaaattgataaatagagtctggataaattatttgttctctaaaagtagatttattacccatataaggcctttgtggcaaataaaatatactacactcctgaattttatcattattaacatcatcttttagagtagttcttttaggaatagttaattttggtatactatttgaatagaattttctaacgggccagagtccacccaaaatacggaataaagaagacttaccacagccattaggtccaataatcaacaaatggtctccatgttttaattcaaaacttaattctggtattagaacttgatctgttggtgttataatagggacgttctcaaatttgattaatgaatcattaaattcaatcagagcattatcttgtaattcaaaagtgttaacattacctgacaagatatacgaatctaagatatcattaaactgatttaacctaattctaacacctttcaattgttgaatatttctcttcaattctacaaacctaccaaacgatgttgatgcagtgactagcaatcgtctatttgtaataaaatctgctgtcatatcatgatatcctttatttaatgggtccttaattaagctggctttatctttaaagaaaattggaatcgaacacagggccaaacctgcagcaccccatgtatatttaataacaaatgtggtagccaaatcgtataatgccttagcccttatctccctatttaagaaaaggaccaacttataaaaagaataatccaaattcatcaattcaacttcctgcccacgtaggaatgctatttcttcattgtttatgcgaatattagaatgtaaaaatctgaaccaactctctaaagaagatcttatcatagtcaaattagtaaaatttggctgtaacaatcgtaataaagaatttgaaccagatacaaccagacccaaagccaaagtgccttcccccatcatacttgaagttgacattaatagcttaaaagaacaaagaattaaatccaaggttggtttcagtaattgattcaacaagattgaactgtttgttgcaaacgtatagatatctaaagttaaattatcttgaatctctgtcgttgcagtggctaccgagtaaaatgtacgggaattagaaagatatttatctaataaaaaatttgatacctttctatttattgtaattgaaaagaattttgtcacatatgctattaaagagttaataaaacttgcagggatacctaatatcatccattgacctaataaaatttttaagaacttaccaatttgacctttaactaaagttgacactagtttaccatctaaagtagccacatagagagatagaaaggttctaataattagaagacaagattgtgtaaaaaacaacaatatacattttctatcagttaaaatcagtctcaacaaaaaatctctcctctttcgcgcctttagattgacatgattaacttttgttgtttctgttgtttctttatcgttaaataaaccaattttattcgagggacgtatttgatcctcatgcaaaagcaaaccatcgtctctctctaaagtaaatgttccagaactgcttgaactctcatcattttcattctctgtatcagtttcaaattcaaaacttgtctttttgaaatatttggaaagtgattttttattatttttatttttactcctattctcagttttactcctattattcatagtatccgcatcattatccttagtattttttaaattcaaattcttgtcattatcatcattttcagcggatcttttagttatattacttcccgtacctactagtgtagaaaagagtaatatcacgtacgatgaccttagaagagtcactctatattttttataaaattttaaaagtaattcctgcattacaatgttaaataataattttttctctttttcccaccctcactgtttgttactaccaacctattctgacctttctctaaaaatcttcacatctatagcatttcactaaatattacatctaaaaagcacaaatacaactatatatactcgtaagacttgacaatccagagttattcaatatttgcccgaatcaaagggctatcttccaataccttcctctccattaactgaccactaacaatatcctaaaactgaggttttaaccacagacagcctaatatttcccctctttacccctctttaaagacctcagagggcttgcgggaataagtctccaggactccgaacaaccctgtgtcagtatggagaggaaacaataaacctgactagattgcattgtattttactgtatcatattgtgttgtattgtattctattgcccaacagaaaaaaaagaaaagaaaagccaaaaactccgagattggcagatatcatcgattttttcttcttttctatggtaatgatgtctacttctcaattccaatatgtgataatatggacaaaaagttgttgatacgtcaatattgatagaaatttggctatctgtgagaaaacatgatccttagtttataaagtggtatttttaacaaaataacaaaacatcacacaataaggaaagaaaaagaagaaaatcaaaaaaaaaaatttacaacttctttttaactgtaattattacaaaaagataaaaataaaaataaccaaaagagttacttaactgctacattagatactatacacaataacaacaaaaatcactgattgttgtccttcacttaatcttcttcttttttcctttttattttttatttttttttcgtttttttatttacaatcaatcaaaccttgctatcaggatgtgatgacgaagtcacaggtagtgtagtttcaagtttttcatcaactgataaagaaatagatggtgtatgtggcatttcaaaaatatctgatgaagtatttcttatataactatcatttgtaactgcagttgtaggtaaatttgttttggaaaatttagatgagcttggagaaatagaagatgacgaatcagaatttgatgtcttttttcttaggatctcaactttatcataaccaccttcttgtttctcatcaatcacagagatattctctgtggattttgtctttagcaacataatactaccactttcatcgagttcctggccctcattctcagaatcatcactgtacatacccacattcttttcttgtaatttaacctctcctttcaaataccttcttgccttccaacaagctactaacacaattaatgtagttagacaacttaacacaaaagctgtccacattaaccctgaataggctacaccagtttgatacacaacaccataatcatcatggtgtgtccctgacttaataacctcaataacaatagcattaattgtagcaccaataccattaaacaatgcagtggaaaaggtgaagccaagtaaaatataccagcaccacatatgcttcacgtcagtgattaaattatagatgataaagccaatgactgcagcagagaaaataattgttaaaagattcatagtcagcaaagctgaaattgaagaaacatattgatgttgtctattcaataaatcaccttccaagtgtaaatcgttggctgaaatgtccaagccttttaaatatggttggaaatcagattccattaatgaatcatatatgatatttctgaaatccaagtcttgtacagcatgaggtttattgcaagtaaggatatccttattaccattggctttacataaagtaaaaattgacaatctgtaataaattggaatcttcaaataatccaataaaattggtgtcatttcacgtaaagccaattcagaaattggttgaacagattgtgcatcatttagaatattaacaattggtgtaaaagtatcaggattttcttgagcccatgaggttaaaacgactaacgatttaaatgttgattctggattagttgacgaattcatcaaagtgaataaagatgggatgtatttaactgtagttgaattaggtgttaacccattttgtaacaacccaacaattgaaatcgattttgttccattattggacacacctaaaagaccttcaagcgccaatagttgttcacgtgtggctgtagtgtttttcactaacgataaagatttaataatatcgagagccatagtagcattatttgaattattgataatactaactagtgcaggtaaagctaatttggcattttcattatttgtaatattttgcttaatcatatcggtcaaaatagttaaagtagaattgaggttagtggaagaagtcaacaaactttgaacagagtacaaaagttcttcttgggaagaagaagatgaggaagaagaacttaggccattaaacactcttgttaaatttgcatttgggtttgattgcaacattgtggataatgtggagaagtaagtcgaaatttgttgctgggggattgaaatgtttgcctgaataatttttattaaagcatcatttaattgtgtcacattattagttgtttgatataaagaaaatacgggtaataaagcaactttttcggatagagtcaaatcattcaaaacttccaattgtttagttgtattcaaaggattagctgagtttgataacaattttaaagtagattcactggcttgtaatagttgtgtattattaaagttctgtaaaattggtgaaactagttcagataaaaactgcaaagtttgattcccattattggaattatcgactagacttgagatgccaactaattctcttgttgattcaattggatcaccttccaatgccaagggagccaatttaaccaaagagtctattgtaacagaagtgttatttgcattagataataataatagtaatggagatagagctggggtagtggatacggtttttagagcgccaaaaatgttattcaaagattgatttggagcagttaaagcagaacctaatattgttaaaattggtttcatttgtggaataacttttgaaacattgatatgagctatatcagcgtcacccaaataaacattattaattggtgtatagtttgaagtagaaccggcagtagctacaattaccaaaataaatgtagtaaaaataaaaattaatgcaattattaaccaatagctgtttctaccaaaatcatgcttggtcttagatgaaactatcagtctcatattatcttattaaaacacgaaagcaaaacaaacaaacaaacaaacaaaccaaaaatatcaaaaaaaataaatgtcgatattttaatggttaccagctattattagtgttatgattgttaattgtagtgggttgcttagtatttgttagaaagaaattaatcaactatcttctaaaagaaaaaaaagaccaaaaaaaagggaatatagttaataagtcaaaggacgatgaacaaacatattcaacattttttacaatttcaatcaattattaaaaaaaaaaacctttgaacccaattctccatttgcatacaaaattagttatatatatatataagtataaacatatatatatacataagtatgtgtatgtgagtatgtgtgtgatttgatgataagttctatttagtcaaacaacaattgttggggaaaaacatcaaaaagccagaaagaacaaaaaaaaaagaataaaaacaagtgataaaagcaacagtgagtagcaataaccataataacacaatattacgactaattaatatcatcgtttaaaatcaaacaaatgaaaaggaaaaaaagaaaagataaaagcaaaagaaatgaatcaactgttaaaccaagttttattatattctcatcctcatccccaccctcaccatatctcttattcatcacaactttctttcaactgtttagttgagtttagtgacagttcgcagatcataagctccatcatcccactatcccactgacctgctgcccaactttatacaccgaaagcagttatatattcatgttttcgttagtatatgttgtcggtcttataataatagccatcatctaaaaaaagacatcccacctccctttgttgttgtaatcttcgaagtcttatcagtttgtttgaatgttgcaacaacaaatgttgaattttgagattacataataatgaagcaatgatgtcattgacagacacgctcaccatccaaaaagggttatttttttatagcaacaacaacaatatggatgatgaaaatgatggcaaataacaataccaatatacaacgaaaacaaaagaaaaggaaacgaaaagatgagttgaaatatgttttgttattgtgtttactttactttccactcggggattccctattgttgcgtctgctgttgcttctgccgcattctatttgtctttcccttttgtgttcttttgttttccagttgtttgtatttcggcttctctcctctttttttttttttttttctattttccatttttcttccactcatttatattgttgctattttttttcttttttctttttttttctttctctttttttctttaatttatctcttagaaatgatatatagacacaatatctccctctatataaaaattgggtattatacattatatggcatatatagcgtcatcttcattgtttaaatgggtaaaatagataaaactactatatacttgacaaagcaagaaaagggcctttttctttttttttgcttttttattttttttttttcaattttcaattcgtaagtctcaattctcaatttacaataaagtataaaatatttgtttgtgcaattataatgtatatgtttacatttccataagggagtcttctggtttatagactacagtatagttaaatgtttgaatcacacctaagaattggttagagtaaatagaatctgccaataccaattgtaaagatataccaaaatatggtccccaaatatgtcttctattaccactactaccaatattgctattgctatttggactgttttgatttccttgtcttataatcgaatcttgtcccattttatctctcccactttcgtcaaatcttactttaccatttatattacatattaatgtacctgaacctggtataacatgataatctaaacttgttaatgtatgttgtgtagcaaccatttgttgctgccacaatgttagaaattgcatcgcatcagagaatggcgctgagttatatattatcttggcatttggaggttgtgcaaataactgcaaaaattcttgtaatttgtttacatctgtgttatccaaatgtgctaaaatcttcttaataaatgtctctgtaattgcaccttgttgattcgtattaatattactagtgctattcattcttatgtatattcctagactctttatttttttacttctgtttcttaacagttattttcttctttttctttaccattcctttcaataaaatttgcctttacgttttcttccatggccttcaaacattggctattttagtttttttctcttttctttcctttcaatccttcaaaatttttgttgaaattttccctttctgatttccaatcttttccgaatactaaaacaaaatttgccagaaactacatcagatcaaaaatgaaaaagaaaagagaaaagaatcaaaaaaaaaaacagaaaaaaaaactttattaaaggaacgctggttttttacccctttaggtaaaaagtacagccttcgagaaactttattacctgaaagacaaacttggacaataattaacaacacacacataataaatgatatctgcacagataaagagaacaaaattgatttaatttttgaaaatttcccttttcagccaattattgcaaaattatatttctacttttggcagattttactatatttgtgtttcactctcgtagagatacattaattgattgattgatcgattgtcaaaaaatagtaaaacccagctctcttcaccctttttctatttttgatctcaatagatcttttatttcttggtatgatttcaatagctcttcagttgaaaaacaatttacataactatacatacacacacacacacatatatatatatatatctattgattaataaagacaaaataaataatgtgtgattaaactacttgtctttttttagagttttttgtaaaatcacgtattatactacgattataaagttcctgtatcagttgcaaaacaagtaatgatattttagtttatcttctctttcctctttcttcattcacttatcgtataacactaaataaaataaactaatccataataagaactatctcataggatcagcaatgcaaacatctctttcaattcaaacgaatacatctaatattccgatgcttgagaaccatataatatcatcatcgtcttcactctcgcagatcccaaaaagttgcacagtgtcaccaaaattatcatactctcacaatgagttaaatattaaaaaatcatggactgccccaaccagtccaattcgcacgtatagatgcaacatccaaaataataaccagtatctaaataaacatttaatgactccacaatcttcccctacatttctagaaaattcatctttacagctacctgaacttcaattatcacaatccaacgtttcaaaccctggaatcacgaaacaaaatgtaactttgccttctttgagacacttgcaattactacctgatccaagaatacaagaaaattcttatatctacccagatacgtcagagagaactccaatgtggagaaatactcttttaaattggtgcaaaactgagaaatatcatgattatctatctattaaagaacaaaatatcaaaactagaaattattatactgcaaatatcccaaaaatgaggaccacaaccacaaatacaataactacatctaatactagtaccaatgcaaacatgactacagatactggtttatcgaaagtcttcagcacttctaatgtcccatcaattctgcaaagcaaagacccattttatggtctttctaacaaaccatgggagtttcaaagccctttaacaccaccaatgtctcccggaagaacctcccaaccaacatttgataaaaaacacaatactactaaccaaaaggataatctaagtaatggtacaaataaccatgatatatttaatcctattataagtgaaaagttgattcagtgtatcaaaaagcaacaaataattaattctaatcgaatcagcaaatcgacatcctctgttaatactcataaaaaaacaaacagttttaaggcattacagataaaaaaaatgttaatggatagagacgtattatctatcaattcaaaaaaaaattcaacaaccattgacaataacaataataataacaaccaatctaaaagttcttccaaaagtattgttattactaattttatcacatcatccaccactactgccacaacaaatgaaaaaatcaaaaacaacgatcataagaatgatagtaatgtatttatgcctgcaaatgaaggcacgacgattactgctactaccacattactatcttctccaaccttaagtccaaatgtatcaagatctgattctcccatcagaagaaaaaaaaacaaagataacaagacacctaacaataatacttcaagatcacgttctagatcacattcaccagtacgtattgttaacttttctaatacaacaactacaccacccccacctccttcttctttacaatataatcataataataataaccataattgtcagaaaactaattattcattaccacgttatcatactttttccttaagtggatcatctagtcctatttacttaacacaacccaccaatcatattgaagataacaattattgtaagactattcacaacaatcataatactaatagttatggtaacaatatcatgttgtactcaaccaattcaaacaaaaaaatatcttccaaagcattaccgagatcgttttcagcacccaattccacaaacacttctccattaagaggcaaagaaagacggagttctcacactactacgaggaaatgtgtttcgtgtaattcccaggattctccttgctggagaccaagttggtcaaagaagagacaacatcaattatgtaattcttgcgggttaagatataagaagacaaaaacgcgttgtttaaatatgaagtgtaagaaaatccctacaaaaggtgaattaaatataatgaaatcacaaggtaaaacaacaggtaccgtagctaataatcccgacataattggtccagtggttgggtatcgttgtttgttctgtaattcaatcacagaaactttggattaaaatttaattaaaatacacgtatgcatatattcctatactatataattttcatcataaagtaagtattctagtatctttttttatttttgtattctataattttgatcttattctttacaaaactataaatgatatttattcttttgttcttacgtaatttcttcttaaaatgaatcaaaaatatctacaataatccctcactatctagaaataaaatttcctgccatctttcattgctgtaagactaaacaagttcccattatcacctatacagttagactacaccaatggcactattctgatctatctcttagtaacttaaagacactaaaaatagaaacaatggaaaacaataaacaaaaaatgtttttttttctttctcttcgttttttttttactggaatttttaatgagagaaggcaagaaagaaaaaaaaaattgcgatgcccaaacaaaacttgaaaaaatttatcttgttttgccaagttttccatgaactttctctaactcctttttggttcactaatcgtccaaaactgctcctctccttattccccagtctctctttcttctagagattttgatttaatcccgttaaataaatttgctttattaagtcctactcagtttagttccctttactgctcctctttcacccccctcctttcactgtattctgaaaatatcgttaatagtgtttattaactgtatttgcctcagcacagacgcgtgtgatctatacccacacataaatattgaacaatttccatttcaacagggaaaacacacacacacacatatatatacatatatacgtacatatatacatacatatatttgtaactcgatcatttatattcaactataactgacaacaagttgtaaaaaaagtatccaactaacaaaacaaataaaatttcttttgagatattgttattatttttatacacacatttatccatttcacatattttcacaaactcaagtagatacaaattacgatgtctggttctacattagttgaatctgaagtttgttcttcaactactactttgaccgatttatcccctattaacagtaccactccatctacttctgctcttatctccactaccaataccataaactcaaaaccggtagctaggttaaataatgaggcattgactgctttactagaaacattcaaacatgatcctaacctacatactcttccacatcaatctgaccatattggtatttttaatacattaaaacaacgtatcaattctattaatgatgatacatgttcccctggtgaagaaaactccttttttgtttgtgatatgaaggaattacgtaacttatacaagaattggaaagtggaattacctcgtgttcaaccacactatgcagtgaaatgtaacccacagcctgaattattaaaagttctagcttccctcggtgttaactttgattgtgcttctaagagagaaattgatacaattttgaaattaggtattgagccacacagaatcatctatgcaaacccatgcaaggttggatctcatatcagatatgctcaacaaaatggtgtagaaatgaccacgttcgataatgctgaagaattacataagattaaaaaattccatccatcagccaaactattccttcggattgctactgatgatactactgcacaatgccggctatctacaaaatttggtgcccatttatctgccataccagagttattacaaacagttaaagacctggaattaaatcttgttggtgttagtttccatgttggctcgggtgcatccgattttagttccttatataaagcaaccagagatgctcgttgggtttttgatattgctgttaatgaatttggtctaccacctttaaagaccttggatgtaggtggtggtttccaattaacttccttccaagagtccagtaaagttttaagattatctttggatgaattcttcccagaaaattgtggcgttaatatcattgctgaaccaggaagatattttgcagaaacaaccttaactttagccacacacatcatcgccaaacgtaagattgacaacgatcaggctatgatctatattaatgacggtgtctatggtaatttaaattgtatccttttcgatcaccaagaaccaacaccaagaatcttatacagtaataacaagttccactatgatgactttaattctacttccgctgtaccaaccccttcccacccatataaagtatccatttggggtccaacatgcgacggtttagattgtatcactaaggaatattacatgcgccatgaccttgttgttggagattggttatattttccaaatttaggagcatatacttcttctgctgctactccatttaatggatttgatcaacatgttgatacgattattatcaatgaagatctttgacaacacaagaaataaatatgcttctttacttatttatctttatttttatcagtatttcgaatcattattaatagactatattccaagaggagtaagaagttcaacacctgtttcttctaacccttagtttccatctctttgttcattttcatccttccttgaacaagcatccctttttaccaaattgaaattacatactttgaacttcaatttcttccttacacgcgtttgtgtaacagaattattaaataatgaaatatatctaaaaaaaaagttccctttcttttagtttatactatctaccgtttttatttaattctgctatctcttgataaaagatttgtaagtgtttactctttacagactttttcttttaatttttttaataacattcaattcaatccgatcataaaaaaagtactaaagaatgtcaatttccatatgcagatgaatcactacatattataaagaaaacacacacaaagataatacatgctatagaagaagagaaataaatattcaactgaacctgcactaattgtttcctaataacagagttttcttcttttaaagagacaagatatctaagatatgaataccaaagaagtttgtaaaattgcaattataaaacctacaattgaaaatgtggtaccgttcaacgtttataaaaagacgcagcctcgacagttagataattctagtaatttaggtatgaccactccatatcacagcaacagtaataacctaaacactatctcaataccgttagatcaatgtattctgttaggtggaggaagaaatttcatattaagtttattaaacagttcaacatatcccaccgagaaactagaatcggttgatttgtttatattaaatacatgtgtggtattatggttcgatgttttaggtcatggtcttgaaataccctacacttcgatagtgtaccatgctatagaaagaaaccataatcataacataccgccaacctatgatgatggccactcactagcattaataataactgtgataaaagacgctgtattggatcagttttttccaagtgaacaaagacatgaatccaatgtaataatagattcggtagaattagtattatatccaaagtattcaacatatgaaagacactataacaatcaagtagaaactttatttacgtttactaattttggtatgaacagaggtgatgaaatgatcagtaattgtaataatgcacttgctatgggaatggaattacacacggattcgtttgaaaatgacgataagacaggaaacacccatttgcaagatatttttaatcaaaatgatgaaagtgctggagcacatgcctcatttgttggtataagcagttttctacagaatgtcacatacaaaaactcaggatctgccgatgatttggataacgatgaagtttttttagatcaaattgtcaataaaaatccaagtgaagctggaatgtcattacaattccaattgaatgacaaatcagctggaaaaaggaattttaactctgaataaatgaagtgttcttacctcttcctatttggcagttttcttttattactaaaattatgaaaatacaaataaaataatattaatcactaatgctgcttcttcaaatataaagattatagataaactattttcgacaatactagttatactcgaataatttcaataaaccctagatcactttaacattatatttttgactttcactttacatatatatgtttggataatcttcttatttcgcatctattttattctttctaagatttttgtttggaaaatggcactaacaaaattgaaaagatcatctttttttttttcttttctttttttttttttaactaaaaaatgaaaaaatttttttgccaatgaaaaattttgaaatgtttcaatagaattaactaaaattttcttttgtttcatttactgatagatgagcgtttttttatattaatacttgtaaaagcgatgaagagggagggttcatttgctaaccatagtcagttgttgtatcaatatgtgtctacggttctgtagctaccgttgtttatcgtagtcttaaatcaccaatgtttatattgactaatatgatttactcttggaataatcatttagtaatcttgtttgtatagtagtgcaagtgagtcttcgagattaataaagcatttggtgctactttttcttttggattgtttcatattatccagcactatttctccacctcctaatcatctaggtctcccatctctcttttagataaaaccattatttcttcgtccttttcagtttagttacactttattctattctagtctagaattggatacattgtctatcatcgatatcttctgcatttcttcatttgatcagtttcaattgttcttttgattactccattttttttagatccatatttctgcatcctatctccaagttcttattatttttaaatcatttaactaatcatgcgtaagtgcaaagtctttgttggcaattcacatcctgaattgggtaaattagtttgtgaacgtttaggtatcgaacctgctccatgtactttaaaaaaatttgctaatggtgaaacttcagtccaaattggtgtctctgtcagagatgaagatgtctatgtcatccaatcagggtctccaactgtcaatgaccatattatggaattattgatcctagtctctgcatgtagaggtggttctgcaagaaagattactgctgtgattcctcaattcccatattctaaacaatgtaaaatgaagaaacacagaggcgctattactgcaagaatgttagctaacttattagtcatggcaggtgctgatcatgttgtgtccatggacttacatgcatctcaaatgcaaggcttctttactaaaccagtcgataacctttatggggctccaagtttagctagatggatcagagaaaatgttcctgattaccaaaatgccgttgttgtttctaagaatgctggtggtacaaagagggtcactgctttagccgattctttgaagattaattttgctatgatccatactgatcgccgtcgttccaaagatctttactcccaaaataaagatttacaacaattaaaactaagaaaacagtctatgttaagaaagaatagaccaatcattagaccaggtgatcacccagatgaagaagaaaatattatattgaccaacggtatccaaactgctagaattcgtaatggtcatgtaattggtgatgatgaagctgacgaaattaataacgaagaagctatggaaactgatgaagaagatctgactttatcagtaagtgattctcattcctatgcccttggtggtacctatgatgcagctgactcagaagatgaagatgctgatgcatcaactgttccaaaagaaaagttaatcactttagttggtaacgttcatgatcgtgctgccattatcttagatgatatgatcaatagaccgggctcttttatcagtgctgctgagcatttagttcaaaactgtggtgccaaaagagtctacgtcgttgctactcatggtatttttaccggtaattgtttggaagaattagaaaaatgtcaatatattcatcaaattgttgtaactaacacttatccaatttctaaggaaagttctgaaaaatctaagaagttagttgtaattgatgtgtctccaattttcgccgaatgtattcgtcgtgaccattacggtgaaagcatctccgttttgtttgattccttagccactatatgatcaaagatagatgtattttaatatctctacactcatttctttatcttcctaatcaatttttattggcgatactttattctatttttttatacttagatttaattcattttcatgaaatatccttcaatttatatctttattgaaaaaaatctttaaaatatgcaaagtattgggaatgaatatgcgtacataaaatatatatcttatttaatcattacacgtttttattctatttttttatttctacacttccaattttttatagtcatgttgttaagttagcatgattgtctcaaaatgcattatggcaattcactttagagtatttgtcttatatgtttcattatttcatacatctcacatatattgttcctcatcgaaaaaacaaacccatatcttttatattacttattattctcaaatacatacctcctcagtgcactcaagtccatcttttctgctttattagtaggtaataaattctttttatttattactgatctcttttccaaagatttaccacaattataatgcacaatgatttcctttccattcggcatataacaccaaaaaacactatctgtagtcaacgaatgaaacttttttttacaaacataacaaatattatttgaatttacctcaataaattttgcagatttatggttaatagaataattcaaattagttagttcattctgcatgatatttttcttcaaagaaaaatcctcatcttttgtcttctgatgccttatagcaaaaactaacaaatctttaatatcctttactgggagcccaactggaagtgtcttcaaagtttggacaatatctaatttatctctatagtcctttaaaaatataactaataattcgttacttgagtgatccccagctctataatttgacttttcaataattgctttcaataagtagagtaatattccagaacctactgtacgatttgctagataaactttattgcagtattctcgagcttctttgtaatcacctaatttattaaataaaatatcaattgatatctcatgtttatgcaacctgtaatatgggtaaacttgcattaataaaacaaagtttttcatttctggcgtcaatgtttcatcagatattgcatttttcaaaagtacaataatgtcagatggattatactgcgaattatttttaagaaaatcttgtaatttcttattgtttatgtcgttgagatcagaaatatatcttcgtacaagataattatgcattttaggatttatatcatagacggtatgaataataaattctaaatattctaatgataatgctttatcgatatttttcaaataactataaatttttaagctgtctcttttaaggttaataatgttacaattttcaaatatagataccaaaacattatttcttacgtgtatatcactaatctgttcaagcagcttagtaagataaaaaaataaatcatctaaattttcatttggtaataacattaaatatttaataataaaatcttttatgctcatgtttggtccaattcgattatctttgaatttatcgttcaaatcaaatagaaactctagtgcatcatgatgcacttccttatgataataaaaatcaagaagttcttgatacatcttcttttcttttaaatcgttgataactacttcctcataacataaattctcaactctaataaatggtccaaccattgatggaacatataaaacatatactttgaaaagaacagtctctactaaggataccattgtttctatttttattgaatcatgactgtctaataaaaaaaaatctaaatcctgagatatgtgcctactttcataattccaagtgatggtcccttcagaagaactcttctgttgtttcaccaacaaatttcttaaatgacgtctcatatcaattaaatatggcaagacccattcctttattagtatcggattaatcttataactttctcctttattttgagatgacaaactattgcatttatgttcttgttgagtaattagttccactaaatatgatatctctttaggaaaagttttaagaataattaattgaggtggtgcccacatagttatgaacatgttgaaaatatctctgataataatttcttcaagtttattcagatattcgataaaactttgcttgctctttaatttatctttatatgtattattattacgaagccctacaattgtattttgtagagcgtcaaacatttgaaggcaccacataacagttaattctcttaacttcattgcacatatatctaaagatttatatggatcatctgaaatacacagctgtaatgcataaggagacttaagaaaaaatctgtaaaacaaaacctttctccaaagatgataaaagtttgaatcatgatacattgcacagatagaaaattcgctactatgcgattgactgtcattactattttccggattattttcatacaagagactaacgttgctcatacgtggactattatgtgttgacagatatccacctagatgttcaccttcatcatcatcaacctggtagatgtacattaataactggtcatcaagtgtccacacaatataatatattccagccaaattaataactttcttaattccttgatcaattctttcttctaaaaaggtaaaaccattattataatcaacaaatttaatagtgtttttattatgtaacaataacaaatcagacgatatgttttcacagtgattaaaatacttattccattgaaaaaattgttttttatcgacagcaattagtttactttcttgatcatcaatatctactgtaaacatgttttgtgtaatcccatcaagaattaatatttgattatttgaaggttcaaaaatatatcttatatccttataattagtgcttgaaaccatattcggctcaattgtgtccttttttttgtatttcttctcaactgatctccagaatgtatattttgtttgccttgaatcattgctgaccatgggtatattccccaatgacgaaaatgatggggtacttattccattctcagttgaatacaatcctttcaaactaaatattgcatcaacaacattatcagggtatcgttttgaataaacttggctaattttcaaaagagcccctgacgactgcgtagagaaagctttagatgaagcattagataagctatcattttttatttctttaaaataccaaatgtagacaccactcgacatagtaaatagcattgcatcacctttagaaactatatgtattgatttaattgtctgatcttttaagtgttttggtaaatttatttccaacatttgattgtaagttcttcccctccaaaataatacccttaaagtagacgcttttgtagtagaataaactaaatatgtgataggatcaccattactaccaatatttatgttacagactttgttactattaatattatcatcagatggtttagtaatactagaattgttcaagttatccatataagttttaacccaaacttgattaatgcctctcttatcatatattttatcatacacttggagattagcactattgagtaacactaacatagacttacactttatgaaaatagtatttaattgttcagaatacaacatatcctgtatatgtaaatctagattagaggcattgggcaaatttcttaataaattagaatatatctgagataatttaaatttcaatggtatagagacactttctgtaagagaatttgaactgtcagatgagtatgaattattaaaagttccattgatatcatgatctgttatatagacctcaatgtccccattgtttttggcaactaacaatctacatgaatcatcaatagctaaaacagatacaattccggaagaattaatcgaattgactagcctacttcttaacattatagattgaaaacaattattatacgaacatgaatatgaaatgtagtatactgatcctgcgtatctagttttctagggtagtagcctcatggatactagtgcaactttacatagtttatactacgaggattttcactcacacttatattgaaattggatactgcggcatccagaaaacgaaaataaaaaccccaaacccaaatataagaaggtcaagaaaaatcataagttttataaaatatggtcaatatacaaagtagtacatacaaaaatatatgtacaaacggtcaaacccaactggatattgttacaaaatcgcttctttttctaaactcaatagaatgaacaccataacttagtccgtcatgttcctcagcaccgaaccaatctctcgaccttaaaccaaatctttttgaaccctgatatcccactagagtatctagaattaaaatattaacaatcaaatcagtttgttctgaatgttttaagtcccaagtgcccacaacattatccatattatttaaattaacgggtgttcttctttgaacaggcactgctggtcgtatagaggtttcataattcctcattttattgccaatttctttattctggaatacacctaggtgtgataaaaccaatagaatatcagaatcatctgtataaacgtctgttccccaaatttcactattcctccatctcttgtttgattccatgcgattaataaattgacacacaacttgtgcaggaatataaaccgatatgattttattaatgtaatctgcacttaaactaggtaaaaatggagggaaatcctccagcacttcatttaatttattctccagaatgatattattatttctctctttacccacccaactgttatattcatccatcttactatatccataaggattataatatatatacttcataattctaggtgttttcttatatatatttttggtaaaatttagtacattacttgaatccactataacatttttattttcaacactagacaatctttctactggctgttcaggcgaagatctattttgaagttgagcatcccttgttgaatccagaatggtttcttgcagtgacaagatcctagattgtgttagtctatactgctcatcagggtcatatatgctattttttgaaactgaatatggttttaagggctcggcggcagatggtataatttgattagagttattagtaattgttgattccattttttgagaccacgctagtagttttagtatatgtaacagtattactcaaaatgatagcacaatgaaaatatgaaaataaaaaatcaagaaagtaactgtatattcatatatatgaagttcctgtaaattagtttgcgtataccttttttttcaaaaccaactttgagatgtcatccctaccttaaaattttctggttcataatagaatttttttttttttttaactcttcttcgattactattctattataattttcaaaaagaccttcactgaaaggggaagcaatctctatgactgttaatcttttaatattacatctgtacatccaaagccacaaacgaaaactgcttattttctaatatttcctaattaagtaatatgtgtatttcccttctttgcggaaaaaaaaataaatgtatactgagaatttctgacgtaaaacaattctgtgtatcacactatactgtaatgtttacgaacaaacatactaacggatagattggaatgtgcatgagagggaagggaatctgtgttttgaaagaaataatgaacactgaagcttttctcaggatagtgattggtatgttgccattgctagtgaaggggagagaggggggagagagagagaactctctactgagaaattgtgccacgcctaggtagtaggtggacctgtagatgtctctctaaaagaggtcattacgttcctcccttccctcaatatctcctctcccagcacttgctcttgccaggaaacccgttgctgttagacagagagacacagagggagagagaaagattacgtacggagcacaaatctgttagggagagagccacagaaacagacagaagcaggaaagagacaaacagaagcagatggatacagagggagagagacagatatgcaatgacatggaataaggaaaacaagttgtggaggatgagtttcattccccacgaataacaaggatattgcataacaatcttccaacctctcttacctacctgtagtggtaacaacgtgcacacatcacatccaagcagtagtaccaatgtattcggtgtgctacagtgtaaccaatctcttgctttatcattaaccagtattagaaaaaaaacaatgtacgttaggtggttaaaggaggctgcatcttgctgcacttgcatttgtatatatcaatccccggaagacaattaagcacagatactcgataaaatggccggtttaaaagacgttgtcactcgtgaatacaccattaatttacacaagagagtatgtagaataatactaattcaagtatagtaactttgagcgaaacaggacaaggaataaatgtcatttaccaatataaaaaaagatactttaagctaggacactaagaacaatgaactttgagtaaatcattaaatagaaaaaaaactgtaaaatattagtgggttattaatcattttttttaattattcacgttagttaatgcttagagattccaatatttaccaatatattatgcattttttgatttaaagatccgattttattgaaatgtgaaatagagaattaaaataaagtatatatatatagaacaactatccgcatctaacaatatgataaattcatttcttctcctcctacgaataaagtatgagtgttcctcgtttcagaagctagattttgtctgaataattggttactaacaagaaaattatatatgacgggatgaagtcatgagtattgtatcttgtgtatattccgacttaatttttatttctttttctttccttttgttttgaatttagttacacggtgttagcttcaagaagagagctccaagagctgtcaaggaaatcaagaagtttgccaaattgcacatgggtactgaagatgtcagattagctccggaattaaaccaagctatctggaagagaggtatcaagggtgttgaatacagattaagattgagaatctctagaaagagaaacgaagatgaaaatgctaagaacccattattctcttacgttgaacctgtctttgttgcttccaccaagggtttacaaaccgttgttgttgaagaagatgcctaaatttaaatatatacattcataattaatatatatattttcgttgttacatttttaagagtattactttaataaacaacactgtccactatttatttttgttaattaattctctgtacatcaaattcaataccttcaaaaggctgtaaacatttctagtgaaatgataaaactaatacagcacactatatgcaaaaatagagtgagatgaattattggccgtttagcaaatgtacaaacaaatctattctacacagtaaatgtcaagttcaagaaacaagagatactattattattactattactatcactattactattattattatttattaatcaatgtcagtgtaactatgacaaaaaaaacattgaccactcatcacattaaaagatcattctatcatagctataataatcaaaaaaactattctatcagaacgataaaatagtcaatttaatcaattataaatagatccatcttataaaaatagccattagaaacgccgactactttctgttctcaataggtcaacaaaaaataaaaaattttatcatcatattaattaataaataaaataaaaaaaagataaaatgatttatcaatgcccaaatgtacaaacatcgtaacgaaggaaatattgacaacaataacatatcaatttgaaaatacacagtagtatgctcactcaacttaatattgttgttcaaaccacaacatcttcagttcaagtcctgaagaaatatgcagttgaccgtgatgtcccgacgccaccggagagatttgtgacagaccaggctagtcaaactttactttaactgcatgtcttgtcctttttatagttaaaaatttttttttggaaaaaagaaaacaaagaattccatctttatgaactctaggtttctgaaaaaattacccgaattttaagtaatttcttggatattcagtaaaaaaatttactgaggtttcagtcttttgcttggtaatatattatattaacacatatggaagttatcttcgacagatgaacatagtttcgtgggttttgaaattattttatagttcagtgatatttatacagacttatatcagtcaaatgcaaattgtactatatatacatacatatatatatatgttaacataccaggtcaatggacacataataaatacatttagctttgtatctcttcttaataaaaattattgttatcactactgttacatcataaatgaattgtgaccagatcagtagctgcaaatggatggttacatgtggggcactttctcattctggctgccaatctttccttaacacaatcttcacagaaagtatgcccacaggtcctgatggcactacttttccaatttttagaacataacgaacaatataccaaagtcctgaaattttctaattcttcagtcagtgaatcattatcctcattcatattttttgagacatttaaaccttttgatttcaatctttcttgtaatttagaaataacctcttggctttgcttattctgcatttctagtatttctttatcctttatggcaagatctctttccttcactgtctcatttaacttaattacacacttggagttctcacctttataatattcatttatcttctttaattttgtcatatcattgtttaaatcgttaaatttccttgattctaatttatttgtgttcattaaaaatttcccattattctccaataatgttatctgctcctgcaaagatttaatcttatcctgtagtattttctcattatctttcaattgaacaataaattcattggatttatttacagtttttaatagatttttgttttcaattaagatcgaatctttagatctcattgaggcaaaatatttttgatctgctttactcttctcaattgtcaatttggatattattgattcatgatttaatagtgtcatatattttttattatttaatgctgttaatttcttgaatgctatttccatatctttaatttctttaattaaaagttgttcacttgaattactagtattgttatcgctatcgccactgtttatactacttctattattgttattactctcattagtgaatttggaccattgctcattcgataattttaaggccttagtaatatcttcaataagttcactctttttagtttgtgactccagaatggcaattttacttaataaatcatctctagtagttctaattcttaccaaatccttttctaaactattattcacttttaataaattgtccaatttgttttgaagagattcggctaccttctgtgaaaagacttctctttctttaactaacgtttgatatttctttaaatatgaatcattaattttatttaattcattattttctttagtcaagctttcaattttattcaaatatgtatcctgtgtagtaataagttctttattacgatcattagtagccaataattcattctctaatttaaaaattttctcaaaattacttttattggaagattctaaattcttcactatgatttgcaaagagtcaatcctattctttaaatctattattttatcttcatactcttgaaatttctgatttgaattaccatcagtgatagcactaataatatcttttttattatatggatttgtattagaagtagattcagttttaatcaacacattcttaacattagaatcaacattcacttctgaattaatagacatatcagcactgctgttaacactactactattactactgctactattattttttaggttaggattaccactattttcttcaattctaacctcaccttctttatcaaatacacgtttcaaactcaaagaatcacttctatcgtattttctaaataaactttcataatatgaattcaactgatccagctgttttacaagtgtattattttgaataatcaatgatttcttatcactttgtaaaactttaatatcattagatagtttctgcaaatcaattgaatccttcttatcttgatctaaatatttcattaaaattttcataaaagaatcatttaattctataatagtatcttcatcaccacttgaaattttctttaaaatcgaaaaatcatcaggattagcagcgccctcgtcattactgacaatactagattctaaaaacttagctaatgtgacaatcacggcaataatattagataaagttttagtgacttcagagtaatctgcctttaaagaatcaaacttattttgaataacattaacctgacttcttctttcgttaaggcatctgaataacgcttccttttggaaatagatgacatccctttgttttaaaggttcatttggatcacttaggaaaggaacagattttgaattttcatctaatctaggtctcttttgaactggttcagacatcccaatgacaaattaaactgaagcaaaataacacaactaaaattctcgtctatcaatttctacagatttaacctctctcaatttgcttttctaattgttaatcctaccaagtagaccaagcctgctagtggtttctcttaaatttaagggttaaatacgatgaaaatacttgtatgatgacgattaagtaataccactagttgttatatctattgaaaaaaagttggttaaacaagatacaaatttggaataatcatagaaataaaataaaaatgtcattagaaaaacaaaaaaaaacaaataaacaaacaaacataaaaaaaaaagaaaaagccgatgtcaacactaatatcattaaacacgaatcacgtgaccacttttagtttttctcaatttcaaatgtatgggtgtaacaaccggagtgtgtgggtgttctatttttggtttttacacctgaaaaaataaaaataataaaaagagaggcagaaatggtttataaccagctacatcttgtttaaaatagaaaagaagagaaaaaaggagaaaagcagtcttttggcaattattttaactttctgagacttattaataactatctatataattacataggtatagatcaccagataaaattgttgctgcgttttatttttttatttttgtttttattttgtttctgtgacaaggatatatacacctattgactttattcacttcatttttactgtttttgtcattttggttttgtcggttatctatcaccacagacacatttagatgacaaccaatacttgtttcctgatagttattgctaagtcaaattggtatgattgctttatgaatttgtaaaatttttacactttccctttttttttctccgactcttctcactttctttctttttgcattatacattttaaacgctttgttttattttgttctgtcgcttatttaacaagtctattccttttattttcttcttttgatggaatctttaagatcacttgtctttatcaaaggaaataagttgtcagatatatggcaaagggtgaatctctcgaatggtgatgatactaataatgaatccattacagatcccccacccgaagacgaaatattgctgttacaaaagaattctgatattaataaggaagcttatttattccatttattgaatcaatttattatctcgtttaataacagaaataaatctgacatctcagacttgattactcacgacagtaagttgcaacatttattaagatatggattactgaaatatttaagagaatgggatgatgtgtcatcttccactatttataataacattactactactttaagacaagttctatatcactggtggatggaaattttaaataatttaaagtatgaacataggaataaccattctttaaagttggatatatcacttctaacaacacttatggaatgtttaaacagaataatgaatctactgatctatgtcccattgagtgttgcgccaaacacagaaggtcataaaaaaaactttaataataatgatatgggtgatgaattgactaattattgtaaacatttattgttaacatgtcattatattacatatcaattagaccaaaactccaaatcaaacttcacatatccctatttgaaacagtttaatgatctactatatgatcagttgggtcttataaatgccttagcatttatttatttccctgataattttaattataatttattggttataaatcttttaacagatggtaaatttaaaatcatatccaatcacaacgatcctttattaccatggagaaagaaaagtttcaaaagaataagaaacttcccacaaaggaagcgtcctatctcggccgccattactgacaataagactaatattaataatattagttgttttaggatcattatatcatacttacaggaagagaaaactttccaatcctttacatatcactattggcgtttgatatttttaatatataaacataataggggttatattgataaaaattcatatggtgttagtaacactaatgggtcatttctagagatggttaatagtagtgaaataattatttactatactgttcatagattttttgttcaagatatcgacagattcaagaagataacaaaacaaatgaacaacaacaaaaataacaacaataataacattcagttcaataaatttattaattatcttaattcaaataaatcaatcaatgcattccttgaaaagaagttccaaatgttaatattgtggaaacatccactaaataaattatttctccaattccaagatattgaattagtatattctctcttattatattatgatcaaaaacaactggaaggtttgaaaagaatatctttatatgaaactcaattgaccaatttaatattcaataaatttctaagcgtattaatcctagacatatacaggtgtaatgagcttataaattggcattcgtggaatcaaataataattaattgtatcaataccagatcatttgaaaatcagatcaatattttaaaatttatattcaatatttgggaatatctgcctaaggagaatcaaaccatgattcttaaacatattattgcaatgaacaatgaaatgttgctgaacttccaacattcacatgtcaatatcatcatcattaagttaataatatttaaaatgttaccatttggaacaaataaaaattcattaatatcatatctcttaagtttggaaaagaattataatcacttggcaaaaaatcaaaaaaaagcggtgaattggaaccatcataattatagacatcctgattcattattattatttgataataacaggaagtatgtattaactcataaaaaagtaccaattaatgaggactttaaaaattcatacatagtaattgataaagaattcaatgattctacaagaagcaaagaacaatcagaagatttagatgatgaggaggtaccacaatacactgctagaaatgaaagtagtaaacaaaaattaatagcaatattcaaaaatattattatgccgtataataatcaacaatatgatactaatcattataataatatatggggaaatgtaaattcaaaagttaatgatcaattagataataactctaatcaaatgaatgtggaatcaaataaaatattaacatttgatttatctgtgtataaaatcaacaacgatattgtaataccaaaagacagattaccaatattgtcaaacacaaaactttataataataatagtgatagaaataacgaaattttattaaccaatttgcataactttataaaaacattcaatttaactatgatagagtattatgattttactagtttatacaatgaaaatgatataagaattgaaatatagaattatcaaaaatatatagcatgtatatatgcagatgaaacaaaaaactattttaatcaaatatatatatatatatatatatatgtatgtaactaaaacaacataataaaaacaaaaacaaaaacaacaattaccaaacgggaaaaacaaacctattattccttcaattcctcttgttgtaaagcaataactttttcctttagacgatcaatttctttatccttttccttaatcatttcatgtaacttttctttattaaaaagattatcttctcttaaattagactttaaggtcaatagttcatcaaccaaatcaaaagttctcgttacaataaaagttagaaacagagttatgccagttaaatacatatttctttgttgtaggaactttcttgacataatttcaatcttttctgtaccttggatcaatccacttttcaattgattcaattcatgatgattgatattataaactttatttattgaatcaacaaacaatagcagaatgaaaccaagcacacatttcacagtaatttgaaccgttttatttttgaaaggcttaattagcactaatgtcaaaggctttctatatttacttggaataggtaatgccaataatgaaaagacaacaacctcagcaactaaaataccaaaaataatagaattataaagtgtcatgatttttatttattatcagttgaacaaagcaaaagctcaactttttctacttttaatgacttgttaacaatctatcttttcgttaatgttgaaggccaactatggtaaaccagaagcaagtcttgagtctcacactcatttctactacaccacctccttaacttttgtttaatagttttcgccctaactaaaacataacataacaataaaaataaaaaaatgaaaaaaaaaggagaaataaaaccttccaggacagggaaaagagaaaggaggagtttcaaagaacaaaaaaaaggagggagaaaaatcgaaaccaacagcttcatcaccaaagatcaagaaagacagaacacaaactcccatagcagaaatcagctaaaaactctctgacgaaaatgaacttgatgtaccatattttgatataatcaatgaatgtagtagactgtgattcaggcagtgattcaattggcaccagcctaagataatcagcaaagctctattatccatagcagccaagatgcgtgaaggtataccaagtggttccctattaagagtattaccttttaatgagataccttgtaaatcatgttttttaataaaacgggtaagatatctgtttaaggaatgtgacctatgataattgttattattcatgtcttgccttttttcattccaattaaaatcataaccgttgatatctagggaagaccttctgtagagtcgtaattgttcctgtaacaatagtgaattcaataaagctcttgacatagtgactaacggatccttccatttttcttgttggtctaattcaatcctttgcactagttgtttagtatcaatttgattcaagggagatattagttgtagtaatttttttaactttattatttgctttgacatcgattcatagacgttaggtttgtatgcactcttttagttcgtgtatctaaatatatacaataaataaaatattatataggtaaacactgttctaagaccaacggagattatttctctaagtatctgtctaattgatcatgacaataaatataaaagaagaaggagaataagtcgattaaaagacgataatcatacacacacaatgtatataatcatttatatagctaacattttccaccaatatagatgaggaaaataaaatgtattagattaaattaaaaaaaaaagttaaaagcaaagaacatatttaaatgtttttaatacatattgaaccaatttttattttatataaatataaagatagacagagatagacaaattatagatcaatatatatacacatatacatatatgctataccgtaaaaaaagtacagaaataaaagaatagcataaaataaataggaagataaaacaggagagaagaaaaaaaaaaggaaaacaaatttatattatagtattaacattaaaatttttatatgaatatcatcattattataattagttttttcgaataggaatggataataacaacactaacagtgggaacaatgtactaatagtaatattgtttatatttaatctttttgtttcttactttcagctaacttagcatagaaatcttctcttttgttaattttatccatatggaaaccccaccaccaatatgacgctaaacaaccgccgatactaataccggttacaatatcaatcaagactcttctcttgaaagcaccttgaattggctgtattggcatttttttctaattttcttgtatactattaagtctcttttgatagaagtaaataaacaaatggatatatatatatatatatatataaactgtcaatcgttcaacttacttttctcaccaggcgtacaaataaagttctagggaaagagaataaacaagttgagatgaaataagtcggcagatgatgaaccatcaaacatagtaaaagcaaggaaagaacatatgccaagtcaaaaaaaaaaaaaaaaacttataaggcccaagcggaatttggtaggttaacaaaagtagcactgactgtggaaacaacaacaatatcaaaatatacaagacgtcaatgatcatatatatccgtgcaaacactcgcaacaaacaattccagatctccaactcacctaaagcatatttatatcgtatggtatacaagctttaactccttctacagaaaaaaagagatagagaaaaaagaaaattccaatcaaatcaagtctcttttaattttacctccttcttccttgcttttctccccctgcgaattaataagtattatttttttttttgttttttttcaccctctgctttttttttttttcggactttatgtttttttcaaaaaaataaaaaacaaaaaataaattctcaccaatcgttctcgagagttttgaatttcttcagcacattcaaagtttcaaattttccaggttcccctacgataactgacgctaccatatattgaacgtatctgcatccaacattatctgccttactgtgtatatgagaggaagagagggtgaagtccaactttgttaagagatggatattgatcctagtatctaacaattagttgtactttcacaaacactagagtacatatatgagttgtgcacggatatacctataaaagctatatttgtatcgttacattattaatccagaaaaactgtaatatttagtatagatatgtcacccttgattcttgttcatcaaacgcatttactcaacggatttaatttccttttgtaatctcttttcaacagcgtctaaaaattcatcggtgttaacgtaagaagatctatcagtcttgcctaaagttaaagccaaatctttggtcataataccatcttcttgaactgtatttagggtggcagattctaaaatattagcaaatctgacaacatctggagtaccatccaattcacccctcttagcgataccacgagtccaagcaaagatagatgcgattgaatttgtagaagtctcttcacccttttggtattttctgtaatgtcttgtaactgtaccatgggcagcctcagattcaaaagtcttaccatctggtgtaacaagaacagaggtcatcaaaccaagagaaccgaaaccttgtgctacaatgtcggatagaacatcaccatcataatttttcaacgccataatgaaaccaccttttgacttgagcatctgtgccaccatgtcatcaattaaacgatgttcgtaattaatgctcaattcttcaaatttggacttatatgtggattcataaatttcctggaagatatctttgaatctaccatcatatttctttaaaacagtatttttggtagagaagaaaagattcattttcttagctatagccaatttgaatgaagaatgggcaaaccctgagatactttcatctgtgttgtacatagctaaaccgacaccggggcctttataatcgaaaatattcaaagtctccttttctccagtcttttcatttgagtaaactaattctaatttacctgcgtctggaactacaagatcagtggctctatactgatcaccataagcgtgtctaccaatgataattggttttttccatccagagactaatattggaatccttgggatcacaattggttctctaaagacagtaccacccaggatgtttctgatagtaccatttggggatttccacatcttagatagattgaattctttaacacgagcctcatcaggagtaatagtagcacatttgacaccgacaccatattgtttaattgcatgtgcagcatctttagtgatttgatcttcagtttggtcacgagatgtgacagacaagtcataatatttcaaatcgacatctaaatatggtaaaatcaatttatctttaatcttagcccaaatgattcttgtcatttcatcaccgtctaattcgacgataggtgttttaaccttaattttagacaattgcctagtggtagatagaaatcttctagaagtaaacattttttctttctttctttctcttctataataggtgaaaaccaaatatacttaattaatggttgtttctatgctccttttactatgtgagtaggaaaaaaagaaatgaattaatagtaatgctagcaaaacccttcagcaaccttccctaaaagaggtacgagaaagaaaaatactctaataaaaatacagctaatacactttaaaagaaaaaggtaatcataacttttcggtagatctatttatctctccctctatatctatctatctgtatatatatatatatatatatatataattaattaatgaaagaactgttattttggcaaggaaaaaacataaaaaaaaagaaaagaaaagaacagaaaaggggaatgaggaccacaactagccatccacacaccttagaattgcgatcactagtgaagaactccaagacagcgatgagaagaaccattataaaaaagtgatcattatatgaatcgagagaacaatattccaagaaactagagaatagatgaccaacgatgtctaaagagaaaagaaaggcaggaattatttcaaatgattgattctttaatcagttattattattattattactattattattctttttcattgcggaaaaaaaaaaccaaaacaaaaaattccctcgatagtttttcaataaaacaaaacggaaaacaaaaaaaatcgaatgactgaaagcgtcactactaattgctattattattactatctttgatatcagagatccattgtaatgttttagaaatctacatagaccatcaagcagtgtctctccttcctcttacagcacttgccacacaaaacacattgttcaaaaaagtaaaaaaaatagatataaacagggttattataatttttttaaaaacatttctttaggttgtcattttttttttgcttgtctgataaaatcctaacggtaggcatttgaccaaaatacaattacataaatagtattgaatattaccaaaatagacaatgggatctttactactaactattctattataattatataaaagtctctcctctcagtgctatgcttacacgtagttattaaatagaatattttatccttttcattcatttattctacctaaaaaatttcaacaataaaaaaaaaatataaaattgctagttataacacatatgtcagtctaaacaattttcttatcggtttatagatttacgaaaaagtttgtatgcataaaagaagacatactattgttgtgttttcccagtataatttattcaaaccaagtgttaactatctataaaatctaaccctaatttcaaatgtttatgaaacttgggaaaatctaaagtatcgtttcccatctaacctttttcacattggtgttgtatctgtgtttcttttttccattcactttttaaaccctctgagaccatatatgtgtgacctagaagtctactactataaagaacaacataataaacgaagttatactaaaagaagaaaaggaatagtctgccagcatcttttatacgaatttcacccttgataatataaacttgaccatatttgtatcttaataatgtatccattaatcttgaaaattaaaatgatataaacacatataataacagtaaagatgaaagacgttttcaagtaagtataatttatgcattgcataagaatacgttaacatatatacgtatatatgttttttcagagagcctattgcggcgaacagttttgttccatctcttgtagaagttctttttgctctttactactcataccaccttcactagcatcgtttttatcaaaagtgtttatttcttccatggcctttgtagtgaacttctcaatagtatcgaaaaattcttgcttcagttggtaatacggttcaccatctccaggtttttcatctttattattaaaccctcttttagctaatgggagtggttcatatagatatttagtcttttctaatatacccataaccttctcgttcaactgttcattatctggtgaataatctggcgagtcatacactgcaataacctcatcatatatcgttagttcttgtttacgtgattctaatactcgttcatctgcatcagaatgttcctttatccattgtttcagatcctctctatattcaatagctgattcataaatggtttcttttttcatcaattcttttgaaagtaatgctataagctcatcttcctcgtcaaacttataagctccttctccttctccttctccttgttgtggttgatcactattgacaaatggatgcggtatctgaacatactctaacgccaattttttcaattcttcaccatatttagcatctgtataatcctgccgttcatatatagatatccttttattcaaattgtctaactgtaattctctgtctttaataattttactatttgggttttgcttaatccactcatctaaatgatccctaagaataactatctcatcataaaaattctctttagtttgcatcatcataattaaatcattaaataattcagccccaccaccactgaaaaaatcattagctatcgatccttgagatgcctgcaatatatcctctttcttatcctttaatttcatattattcaaacgtgacatagtgtttcctatcaccgtactgaaatctactcgatcatcagtcgaattgggttctgtatgatctttttgattattacaattttcatcctttgagttatccttattaaaatcttcactctcatcctccaataaagcatcgagatcatcataatctaactccttatcactcatcttcatatgttggtcttattagtattattacttacaactattttcctcctcgtttgaaacgtgagtaccgttactgaatagactactaacaaaaagtatgtacgtcaatatagatatgttgttactgcacaaatacttatcctgttcacgttacatacatgtacagaaacctcatgtatatatatcactatttacttgaaacaatccatcttcttctagtaataccccccactctcactttctttcctacaactacaaattctttcacgtaaaattattcaaaaaaaatgctaacaaattgttttttttttcttataactctcgaaaccttcaatagcattacccttaaatacacaaataaaaattactacagagcttatattgctatatgatgttgttataactatcgccgctctacgcatttctttgaattcattgattttaagtaaacaggcattttctgtaaattattgcacagatgaatcgaacactataactaagtatatatattttactataatacaaggattgtgaacatcataattaaatgatattaaaaatcgagactaaccgacacaaataacaaagagataagaaagtactgttacccaccactttcacatgatttctgatcaagaataaatctattatggtagcatagaggctattgattatcagagtatatgaattgtataaagacatcagttttgatgtcgcgagaaatctgtattgaatctgcagaatcattatataatggatataccgtggtatatatttatatttatatatattataatatctgtctcttcactgtttctcttataatctcagtcaataattttaacaattccctttttttttttcttctcttttcttctttcataaaaaaaaaaaatacgatgatttatcttttggagtaaagtgtaaaatttcaaagtttattgagttctaataaaagaggacatagaaaagaaggaaaagaagaagtatttttactagatacctatcataattcttttttacaaatctttgagaaagcattaaaatagatttagggaaagatagttcgttgtattatcagattgattctactctctatttcactattatattaaacaaaaaaaaaattaacaagaaaacacaaatagcgctaaaatataccatctaattttttttttttgaataaacatatacaatcacattatgagtagtctttgtttacaacgtctgcaggaagaaagaaaaaaatggagaaaagatcatccatttggtttctatgcaaaaccaaccaagaaagctgatggttcaatgaacctacaaaaatgggaagctggaatcccaggcaaagaaggaacaatatggtatggcgggttatatcctttgactattgaataccccgatgaatatccttcaaaaccaccaaaagttcgactacctgccggcttctatcatccaaacgtgtatccaagtggtactatctgtttaagtatcttaaatgaagatgaagattggagacctgctatcactttaaaacaaatctgtttggggattcaagatttattggatagtccaaatattaaatcccctgcacaagaacctgcttttagagcttattctaaaaataaagaagaatataaaaagaaagtacttcttcaagctaagcagtacgcaaaatagaacatagaataaataaataaatactttatgaaatttcacatactttattctatacatttatatgtatgtagtgtaattgattatgcctattactcattttacttatcacctttttctttattttatatatatatatatatatgtcaccaggaataataatatacaataattacagagaacaccgcactcttctatccctttcttcatgtactcaccgtctttcattagctttataatgaagaaaactatctaatgtattataacactttgtacatctttcctttaactcaggtgtcttgtttttatcaaccatcttaaaaacatttctcaaatgtggctggactttctccctcaaaatatctaagtatccaccttgaacaaacactatttcatcataatcgtagtcacgatcaccatatatttcaaacattgcatatatcatatctattaagagttctgggggagtctctaacgaaaccatcttttcaagtaaaaattcagatacaaatttattgatttctattgactgaccttgatatgatgctattgtaatcattataccacaacactttgttctgtattcaatatcatcattcagtaagtattcttccttaatctttgaaacaaaccccaaattattccatatcaaccattcttgtaacaagtcaatgtatcctagtatcccacataactttaatattacccaaataacactcattttaccaatttttataatcatatcttcttgtgttaatgtatctgtttgattagttatttcgttccacaattgctttaatatatcagattcaattggttcgtctaatgtcacatataaccataataaattattccatgcgattaagactctatctgggaattcttttaataatacaaacaaaaactgtgggattaattcatggatagattgtgttaattcttggtttagcttaatgtcagaagatgcaataatctcaatgatacccgtaataacatcgatcccgacttcaatagcttgcagttgcatcattgactcttgtttagccttagtatattccttcaatttttgggtattagctgttaccaaatttgaatcaattgtaccatcactgttaccattatcattgttacttaatacaacatcactatataaaccttttttcatttggtcgagattaatatgcttgattgaactaatcacttttatgacaatttcattacaattagtggatgtaatttgttcatcaatgacaccatccaaaaattgtaattttataccttgtatcaatatttgagtcaattcattattaatctccaatttatctaatgaacttaaaaggatagcaataggttcaaatgccatcacagaatcgatgaagtccaaagattcggaactaaaatcatagatgaaatctaatagggtgttttgtaaatgacatggcaatttattaaacccatattcaataaatttgacaaatgtatacagtatttcatgtaattgatcgtcttgtaagatttcattcaaaatttgatctgccccattacttaatgcgactatcaaagagattaaattgtccgaataatcaaacaacaatcttttagtgtgcttgcttatatcctttctttccctttcagacccactctccatcttagatttaaccatcagatccaatgattgaacaatcttatttaagccatctttaatggcagtccaaatttggtttctccataaatgaatagccaggtcatagccttcttctaaagtcaaatttctcaataaaccgactgcctctataacaatatccatattgttatcatttaaaaggttatttaaaatgatttgaatcaatttttccttcagtaataaatgtctcatgtgtggatcttcacataacacactgattgaagataaagcaatatttctatcattaggaactgcactttgtaattgtttaattagtggctcaatctttcttgctactaaactggcatcctttttagacaaatcagtcttatttccatccttatttaaagggtttagtctgtttctagaaacccttgatctctttttagatttccccattttattcttatttattttatttttttaatattaaataattaattaatattctcgttcttggattcaaagaaacaataaagtaggaaaaaaacaaaaagatcaaacattatagaactattggttaaaataaatatatattaaaagcacaaaataaaaaataaaaaataagaataactaatacgatttttgcgatgagacggccttacaatcctctttaataaaattacaaaaaaaatttaactatttaatctgaaaataatataaaatttaaaaaataacaaaaaaaaaataagttgattcattattcgtttaaagtgatgaatggtaacgacttgttaaatcatctcaaaatatacatatagcatatactctaaataaatcataaatagttatatcaaagaagataaatggataaatgttatatacatatatatagtgcagtaatgagtcataaggtgttacaaaatgggttaaggatgctaattattcattcctctgatttaactttaatcttggacacatagagtccatcaataaaataattattttctacttttgtatcataatccagaattatttgttcgaatccaagcaaacatttttttaatgcatcattaacagcctcttttttggctctactgaaacagttcccttttgatggcattgttgcctttcctacacctgatcgttttgtgtttgtaccatcttttaatataatttttacttcagcttctgcaataaccatataattaaaatcttgatctttgagtgcagtagacaactcactattcatgtaatgatccgtaggatcatctagatgcttatccatcatttcattcaaatgcaaagaagattgagcaactggtacttttacacactcggtagcctcaacagtcaaaatttccatcttccaaccattaaacccaaatgattcattagcaaactgtttcaagatataagctggtataactctagccagattatgtttgccaaatctgttcctgtgatatatcctgtatgtgaaatgttcgatctttgattgtaataagccaatcttagacaccgaccagtcacttgctggcctaccatcccaatcttctattatattcagttccttgatatctattttagaactggatgcactggtgtataatgtgtttgaatatgatatgtgtgtatgcgatgccattgtcaaaaatgtatatatatatatatatatatatataaatatatatttgaattgagtcgtgtatggtcttcttgtctcttttgtataaatatgtattatttagtggatgatgagttgtatgcgacgggaataaacctttttctaatttagaactaagttaaaccatcaaacaaatcaaaagaaaaaacaaaggaaaagaaaagaaaaacaatcgaagtgaaaagggttatagagattgtctgctatttatctaaaagaagactagagtatgacataagaattagagtgtttattaatatttcaaagtacataacttaatcaagctcgatcaagtttcaaaaaaaggaaaaaaaaataacatactattataagaagatgaggagttatatacagtattactatatatctggaacttgcaatatgtttttcctgattcttttttttttcatttttctattattatttttgttatgtttcttcacataccacatatatgaattccttattcttgatcatgaatcagccatctttgggttacacagttttagataaatccaaggcctgattattatctattattctctgcttctctgttttttctgttttctgtgtttttatataacccttgacttatttcgccataccttgagaaaaactgtgtggtttgtctgtaaaacgtcgcaaagaaagaaataaaaggtttcccaaaaaaggtgaaaaaaaaaaagaaaagaaaagaaaaaaaaaacgaaaaattcacacaattttttcccctttcttttttctttactttgacattaaacaggagaaagcttagggttgtttttaaagccctattaaattgccactttcaaatagaaatcgtaccaaaaagacaattacatatgcattatatatatatatgtacggatgtatatgtatgaataattggcttaatcatcatttgtgctttgacttaggtggacaatattatgaaatgatctaattgaataaacaaggaaaaatttcacgcaaaagtaaacaattacttgtttgaaactagattcatatatttttaaatggctctctcatataaacattaacatccatcttcagtatataaaaaaaaataagaatgaaagaaaaaaacaaaataaaataaactgttgtcgttaacttatatctgcatcagtaacaactatacagaccaatggtaattgcttactttaataagccgttatcgttacaaaggaagtatattgtgacttaatttcttttcacttcatttcttctccttttcttatcttcaatttagcattttcgggtttttgtcttgctttcttttctttttcttttttttattttcttttatctttaggttgttgaattttatccttagaattagattacatctttaatatacttgattatctaaaatcaaacacctcttaatgtgcttatatttattcttacatctgctagaataaatactctgtgtttcctttataataaaacaaaacaaaacaaaataccaaatattgataaaaagaatatttaacaaaacaattacaaagatataactgttatactctaaaacaaaacataaaactatacactttttataaactattgtaatatgccaatcattattgcagccgataacgaatttcatttgtcgcacgaagaagaagataaattaaaccaattcaaagcaatatcagattttcccgatgaagacttatctttaattatcagattattaagaaatcatagttggaatctagaagccgctttatcccgctatttcgacggcaattggagagaaaatatgggatctgttatcactccttcacagaataatccatttatagatgtttctttccctgaaccagtgactaatacattaccgttatcaccacaaatgacaacggcaacaacaagaaataatttcaatactactgatcccaatatatccactaactataatgatattaataatacatcctttttccgcaccaaaagactgattccatcgatacctatagtcaataggctacctgcagactttaaaagtaaatttcaattggttggattaactaagggtaatgttccatactatactacagcaaccacaacctataataatagccaaaacatattttatttactatttcttttcatcccacaatctatcttcaagatagtctcttttctttggtctgtcttatcaaaattgtttaacaatggttctgccacaattgttaataaaccaaagatttttagactgcctaaacacccaactcaaaatacaaatccaataaaattatcacaagtattgatatccaatgatactggcacattaaatacaacgttaatgaaacaaaaattaactaaattaaatgacttacttggtaatatagataacaaccgcgactataatgacagaataccatttaacgacatgttggacatctgtgaaaaggaattcaagtttttgttagtgattctattgggtgatcttgatatggaatccagagatactaataaatttgataccaattcgcaaaaattcttgtctcatgtattattagatgacggagtaatgaaaatcctacatgattataaagatgatttacttgtgtatatgggttcggtaaccgagattgaaccatggttagtggctaggaatttaaatgttaaatatactccagaatgctttatgattggtaatgtacttaattcaaacaactcagtgaatggaactttaaggttaagtgttttaagtaagttaaagattacatcacctagaaggttacaaaattccttgaaattggtatttgataggtataatgcggaactagtggttggtaggaatgaaatggaagagttaaagatgtctagagaaatcaaacagttacaggagcaagcatatcaagaatccttgttgaaggatcaattaaaggaagaagccaaacaattaaaactacaagaagcaaaacaaaaacaaatggaggaaataaatagactgaatcaattaaaaattaaagaaacttataaatcattaaagtggttatctaactgtattaatatcttcaaagatgaattatcgaaagtctctatgaatcaagaaagtcatgattgtaagaaaaaaaaattggccacattgcaatttagaacttcgaagggtactagatttattaaaaaattcgatgaagctacatccttatattccatctatataaatattggatgtcacttatttttacaaactgattcattaaacatcgattcatggaagcaaagtatattggataaaataaaaaagttaaaaagtgatgaatcattactatgttttaagggtgctgcttccatggtaggaggagaaaatattgatgttgcagaattagaaacattagttcaagaagagttaatgaaatttaaaaatatagaagggcaaaacagactaaatcgtgatattaagaacaatcagtcttttgaattagagtttaactttgaactagtgtctccatttccaaggtatcaggtgccaatagaaaaaacagtgactgttaaagaaatccctcagttatggccaaatgggagtcttttaatagaagaaattattaatgaagaagaaacttctgaagaaggatcggaatatgacgaagaagaataaaaaaagaaagcaaggataactaaactaatgatatattatgttattaatattattataatataaatgatcgtttaataatatatacatttttaaatccatctttcaaatttccacaataagaatgatcaacatattttgttatcttgattcacctgccttgtaccaccttggatagttatcttccctgacttttaaaaattatctaaagaatcctttgagtttgactctcgtattatagataatttaaagaccaaaaatgggaaaaaaccgtaacaatatttttttttcttttttatgtgtcgtctttcgatatattttttttcttgtttatctttttctaccagttggaaaaacattttgaaaaaaaaaaataatacttaaaagttctacaacccattgtaatttatttaaaataagcaaaacacgtaatacgtaaaatagtaacattgatacctcgaacaaactaaaattagtgttaggtgtattctcactttagatatccgtattagaatacactggtgaactctttatatataagaatatagccaaacacaaataccgacatacacataaagaaaaaaatagaaaaaaatgtttgagcaaattgcttcaaccgcttggatagctttcttattccttctaactattcctatcaatgctctacatttagatattccagccacaatgcaccctgaccccatctgtattcgtgatttcactaacgagggtcaattagtggttcttcatgttcattctgatggttctgttggtgatggccaaaaattgagtctatttgtccgtgattctcatggcaacgaattccgtaacaaaaaggattttgctggtgatatcaaagttgcttttactgcaccatctacctcttcttttgacatctgttttgaaaatgttgcacaatctcaaggtagatcaatgtttagatcggttgaactggacactgaaattggctctgaagctcgtgactggaatttaattagtgcaaatgaaaaattaaaaccaattgaggttgaattacgtaagattgaagaattgactgatgaaattgttgatgaattagcatatttgaaaaatagagaagaaagattgagagatacaaatgaatccaccaatagtagagttcgtaacttctctattttaattattgtcatattggcttgcttaggtacatggcaagtcaattacttgagaaatttctttaaagctaaacacattatttaaaatcaagtatatttatctgtatattttttgttttatattatatttatagtctaaatttctttgcaaatatatatatacataaatgtattttgataagaaataagaaataaagaaaatatttacaaagattagctgtatggctcttctttttcttttactctttctttttgaaattatttagaattgaaggtatcctaatcttcctaaaacgttagcaaaatctagatatgtcatatatacccttgagccacctgtggcacaggacatcattcctataatatcaaaatgcttactgttgcttttactactaatcacattattatttaaaagagtatcaatcttttgtaaatccttaacacttaatacatggtcctttaatctcacattaggaaaattatctaacctgccagaattttttaccaaaagattccaaaacgaagtaataatatcatcattattcatatatattaataaatggtaggtaactttgacaattttatcaaaatctatcactttggtatcctcaactacaacatcctcgattctaaccaatttatataattcatgaggcatttgtaaatcttcaaaataactgttaagatctgtcgtatccatatcatgttctatgctatatttagcaaatgtttccagaatttcatcttcaatttcttgcggtattttacaattttggaaattatctactactgaataatctaaactcttctttccactcatggtttagctatttcataataataattatagtaataatgacttaagatattactgagagaagtaaaaacactctcctattcataatatgtaaaatgaacaacgtatcaaacctacacttatatccgtatatttcttctcctataaaaagtattaattacacagttctgaaaaggaatagatggttcacatattgtagctagatatacttcatcaactttgtacatgtcaactaatatgcccctgctttgtgtaggtatagtaaccatcatcatccgttgactgcattcaaaataccaacattccatttcaattgacactaccatatttcacaaattcttcttctaagatattgttcgtggtaaatgatattgtctaggtggagattggaaaaaaaacatgttaaagaagaaataacaaagataaagaagacaaatagatcagccaactgcataacaataacaacaactacaaaaactaccaaaaatttgtctaatcatttgcttgtttagctctaataattaattgaaataagaactggaatatcaccataatatcaattattttttctctaaacttttgctcttagagtaccattagttagaaaaattagtagtaaaataaaatagaaccaagatgagtgaaaacagtcaactgcagactgaagtaaagcaatcagatagtgcagagtcaaaaccagactctgtagtatcaaataatcaagatacagattccaataatatatctactgaaagttcaaaagaatcacataaaagaagttatgatgaaatgtccaaagaatcagataatcaagttaaagatgaaacaaaagaggagggtatagatgaggcaacaaagacagaaactaatgaaaaatccgaagagaaaaatatagcagaaaatgaagaagatcaagaacagcaacaagaagtagagtatgatgaagatgagctagatgaagatgatgaagaggaagaggaagaagaggttccatcgaaaagacaacgtcatgaaagaaatagatttttggatatcgaagctgaagttagtgaagatgaggaagaagatgaagatgaagaagaatctgaattagtcagagaaggttttattactcgtgatgacgagcatgatgaagaaggtcttggaggtagaagagatgatagattacatagaaagttagacagagatttgcataagacatccgaagaggatgctcaacgtttagctaaagagttacgtgagagatatgggagaagtagttccaagcaatatagagcagctactcaggatggttacatcccacaaagattccttttaccaagtgtggatactgccacaatttggggtgtgcgtgttagaccaggtaaagaaaaggagttagttagaaaattgttgaagaaaaaatttaatttggatagagctatgggtaagaagaagttgaaaattttatccattttccaaagagataattatcatggtagaatttatatcgaagcgcctaaacaatcagtaattgaaaagttttgtaacggtgttccagatatttatatcagtcaaaagctgttaattcctgtccaagaattaccattattattaaaaccaaataaatctgatgatgttattttagaagaaggtaactatgttcgtattaagaggggtgtatacaaaggagatcttgccgttgtggatcaaatcagtgaaaataacttagaagtcatgttaaaaattgttccacgtctagattacggtaaatttgatgagattgatagtaagaccggccagcgtaaggctagaaggcccacttttgcacatagaccacctccacaactgtttaatccaactatggctttaagattagatcaagctaatttgtacaaaagagatgatcatcattttacttataagaatgacgattatatcgatgggtacctatataaatcctttaaagttcaatttgtggaaaccaagaatattcagccaactgtagaagagttagcaagattcgggtcaaaggatggtaatgttgatttaactaatatttcccaaacaattaagaagtatcaggcctctaaagtgacattccaaccaggtgatcgtgtggaagttttgtctggtgaacaaagaggttctaaaggtattgttacaaagactactactgatattgctaccgtgaagttacctgaattcccattaaagccattagaatttccaatatctacattaagaaaaatatttgaacctggtgatcatgttacagttattaatggtgatcgtcaaggtgatgcaggtttggttcttgtagtcagacagggccaagttacttttatgtcaaatcaaacaagacaagaagtcacaattactgcgaacaatttatccaaatctattgattcaacacccacttcgagtgaatattctttgcatgatattgttcagttaagtgctaaagatgtagcatgtattgttcaagcaggtcatgatatttttaaagttattgatgattcgggtaaagtaattaccataactaaaggttccatattaaacaaaattaatacatctaagctacgtagcgccacagtagacaataatggtaatgaaatcaaaattggtgatactgtggtagagaaattaggtgctcgtagagaaggtcaagtattgtatattcataatcagcaagtttttgttatgtctaaaaaaattgtggagaatgcaggtgtctttgttattaactcgtcaaatattgacgctgttgcatctaaagataatttgttgcatacacagatgaatttaaacaagatgaatccagagattatgaccagaatgagaccaccatctatgggtgttgctcaattgaattcacaaccaagaatgggacgtgaagttgctattggtaaaacagtaagaatacgttctgcaggttataaaggtcaacttggtattgttaaagatgtcaatggtgataaggcaactgttgagctacattctaagaataaacatatcacaattgataagcgtaaattaacttattataatcgtgaaggtggtgacggtattacatatgaggaattggtcagcagacgtggaagattaccacaagccagaatgggaccaagttatgtcagtgctccaagaactgatggtactatgcctggtgcaactggtccagatacatctgctttaagcaatccactatctggtggtatgactcctggttggagtgcatttgatggtggtaaaacgcctgctatacatagtcaacaggcagtgggttcagcttccacatggggtggtgcgtctacctggggaggtcaagcgtcaggttctacctccacgtggggtggtgcttctgcatggggaggtcaaggcgcgggtgccacatctacttggggtggagcatctacctggggtaataaatctgcttatggtggtgcttctacatgggcctctggaggtgatagtacaggagcgacatccacatggggtggtgcttcgacctggggtaataagtcctcttatggtggtgcctctacatggggtaatcaaaatgtccaaggtgataagtctaactatggtgggaacagtacatggggctcacattgataaaaatatactgcctatatttacactaaaaaatataaaataattagaaatagaaacgttccattcgcatgatgtgtaccaaaaaaatatgggatcaagtttttaatgtcatatataattataaaaaactaaattcatctatataatattaatatttatttttacgaataataaaattttaaaatagagtactcgtgtatgtgtatttttatgtgccgtacatttttgttagtgtatatgagaagttggccaatgatgagctttattactgcgtttctatgcattttaataaagggttgaatattatcccattaacaatattacatatacatctgcatatatatttagtcctatatatgtatatatttgtgtatcattagattttccattgaattcttttattttattgtatatgtctacactcattatactatttacagatattacctcttttattagaagttttatacttttacaccctttggtgctcttgaaaagattacaggttttctttcagcaacttttctattctttgattctttaaataacacatgtctttttaccacaggatcgtatcttacttgagtcaccattggtgcaccctttttaactgtaatatgtctaaaataaccggttgcagcagtagaaaccaattttattaccgacgtcttaacttttgcgttagccattgaataaattaatgatttttctttgtactgccaaaaaaaaacaaatatgcaaataaaaataataaaaaatatatgatattttgaattgtttgtttaaataaattccaaagacaacagattgtttcttctaaatgacatagaagattcacaattgtttacaggatcttgttcttttttgctatactcctaaagaaaacatatcactttaaaatcctttaaagcaaataaccaaaaaataatagatcaagaaaaaataagaaaactaaataaaacagagcgatcctcagggatcgaacactgtcgcacaaaataaacaaaccctaatttattcttgatcataacttacgaaccctaatttaacactacaaaaaaaattttttttatttactaaaggcaaaatctaacaacagatgagagaaaagataaacaactgatttataatgtaagacaatatatagtaacgttaaagtagtctaaagtattatcaatcacttaaattgacttttcaagcctgcacataagagaaaagcttaaatctagattactgcagtaataagaaatacatctttatttaaagcagaatgtcacaagtagtagctccagagattattgaaaacccagatggttcaaaatctgtgattacatataaagaagaaaatggtgagaaatttaaaatcattcaaaaaattagagaagtcaaagttactgaaaaagtccataaatctgttgctgaaagaatgaagtggcataaatatggtctagaaaaaaactcaccaccaggtcccaatgattctaccactcaactaggtgaagaagtagaactaagattaagcagaaattggaaacaagttgaatttgaaagaacacagaagacaaaagttgcttctgctaagacacttacttgtagattatgtggtaatgatcattacactatgagttgtccattcaagaagatcttgaatgaaatatctgctttagaagatccagcttcagcaggtactgtcactgaagaagatgctgctgaattaaagactgctgaaagtgctgataatagtaaggcttccggtagtcgttcatatgttccaccatcgttacgtgctgggtccagagatccatcttctaatgcatacagagatgctagagaacgtgatgacatgtgtacattgaagatcatgcaattgaatgaaaatgctgatgaaaataccttaagagaagagttattatttccatttgcaccaattccaaaagttgttgttgttagaaataaagaaactggtagatctagaggttttgcgtttgttactttctctagtgaggaaatggctgaaaaggctttacatttcttggatggtagaggttttatgaatttaattttgaaagttgactggtctaaaccaaagccaccaaaataaacttaaactgaaattgtaaagtttaataaataaagttagtaatttgaaaggccatccttgtcgaagatgaaaaaaataggaaaaaagtgggatgcaaatgtaaattacaataattagaaagccaaataaaaacaaattcttatataaaaaaaaacttattgatgtaaattcattagtgtatgtgtatatctatcattatatatttgtaaagattaaccaaatacgatattattattttagtttaatatgggaaattgttacttgtagtaatactggacatgttgtaaatttttactatttattttttctgtactcttagttaattttgagatagtaactgtccaaattatataaatgtatcggtatatgtacatacaatgtttacatacctatttattaacacatgtaaatagagatgatatttatatattaggataatagcaaacaggtttttattaatgttcatatatgtattggttgactatcttattctctttatatgcaatcaatttttgcttttgtttgatgccacgtggttagacattcttttatccaatttaatatagcttttgtaatattttttaacatcatgtgacaagtcttttttataaatcttagtaagtagtttagattctttaatgtggattcaataacttgttgtaaatccgaatgaatgagagtttcacaatctttcaacttgattaactctttatttaatttctcgatttcttcatctctttccattttagttaaaaattcaggttcaatttgaccgaatttattcttaattttattttttcttttattcaatctttttttactcttctgtaattgtagttggatcaatagttgagaatcattaattatttgggacgtggaatcagtttccgagaattctactccaatatcatcgtctgaatcagttttcttgttctgtgtgttcatatttttaatagcagttgctattgtcggtgatgaaagagcatctctttttaaaaccatatctaacctttgcattttattgtcaaaattttttagttcattcaatctatgctttcttctatgtatagtattaacaatgatttgatattgaacaaatttcagatttttaaataagattatccttcttgagtccttaataaattttatcaaatcatctaatggttcctctataacatttgtcaaattttcaattaaaatttccagtgtaacatagttcacatcgtatgaatggcctactttttcaatagccatttgtaattgtctaatggattctaaaggagtcgatgaagatgtagccgcgaatgatgggagtgaggtttccaatgacaatgcattataatatgctcctaattcagcaaattgtgatgataaagaatgaatatgaaatttattatttttaatctttgataaaagtggttgtaaggaatataaatattgattaatttgagattctagtttattaaaatcgtttaagtggaatttttggattgactccattgacatgttttgatttagaagaaatttattcatgatatcattataattattattattggtagttgtggtggtagcagtagttatactaccacggatatcattatcactattattgatagtattattattagctgaattcaaagaatttggagcaggtaataaaagatgcaaaggacttggtttagtcacgttcaagggtggtgctaaaatgttattattaggcaaaactgagattggaggagaatttaatacatctttccaaagatagtttggatttaaaaatttttgaaacactgataatttttgaatctcttcaattttattacaatgatttagaaacgccattaatcttctttgtctcatggatataattctttgatcgtttttagcattaatgggattcaaaaaatatttgaatattgaatgttttgatggaattggtgggattattacagttggcagcaatttaagcaatacttggtataaagaatagaactcagaataacgtcttgttacttcttgttcgatagtttggcctgtattctcatcaataatcttacttctaatgatataaccaattgcatgttttccccatggatcattatattcacctgaatctacaataacaattggaccattgaaaaatgagtttgacatgttattgttatggtcctgtgtgttctcatctttgatattattactagtggtagtagtaatattgttgtccttactatatatatatggattgttagttatataatttttttgataaggtaaagacatcgaaatagataaattttcaaatggttctagatcagttgtattattacttgaattgtttctattacctttgcttgtgttattattattattattattattattatttgaaattggatttatggaattattaaatggttgatccaaactaaggatatgtgaatctgaattatttgaatttattaaatttgttgaagaggaagaagatgatgaggaagatggaaaagaagcggaatgcaatggagatgaagaggactttaagaatgttattgaggaattattcttcggagtattatttattgagtcgatatgatcgctatcatataaatattgaggtcttgttggtgtcagtaaattattattattatgattagtagtagtatttatgtgtgtatataagttaatatcatggataccagacgcaaacaaatgagtagtgcctgaaaatggattattatcatattcaaaattatcacttacatcattttcatcatcatgtatgttatttgaagtgacagaaattattggattcttatctacaatattatctctgttcgaagccttatttacaattatattgttgctactctcgttgttattagcattagtagtagtagtagcaggactgtctattattgaagattgcgacattgatggcaataccaaagactttattgtataatattggaatatgaattattagttgaatattcaagtatcaaatattaaatgtcaaatatacttatttcttaatatcgatcatagatagacaaagggctgcataaaagtgggcaaagtataacaacaattgtacgtttttatctatccaggtaataagaattacagatttaaaataagaaggtttcttactgtattcttcttcttcttcttctgtttttatttttttattttgttttagctgtggccgtcgatcttttgtggtatttggatttgtttgaaaacctgatgttgagtgtttttatttttatttttatttttattttttcttttctctctctttcccattttaataacgtcatacatacctagaaggtgttattatatgcagaaaagagagtgagtaagagtttagtttgatagaagaggatctttgttgtgtgaaacctggtatgagacgtttcttgaattggaaatgtgcgtgtatgtgcatgtcattagttcaaataaagaattgttggatgattaagatatacatacaggtatatatgatttaattcgtggctacgtaaaaaaaatataaaaagtacaaaaaacaaaaaaaaaaaaaaaatagtaataataatagtaataataataatctatctatctatctatctatctatttcatttatttgtttgtttgtttgttcagttatttcttacttaatctttgttttctagttcttcatcatcttcttcatttagaggttttcttgccacaaataacatcattggggtgaataaaccttgcttaccaccagccaccaaaccgacagcggcattttccaaggcgtcagtgactctggtagaaccctttgggatgatcttgaaggtttccaaaccgtagatcatgaaattggtcaactttctacctaagtaagaagttctgaaaaaggttaaatagtcgtttaagttttgaatatatttccaatccccagtcaatggatagtaccatgggactggatcctcaggagaagccaaatcctcttgttccaaaatttcgaaaccagaatcgatcaaagcagactctgcgacttctcttttgtacatctttgggataccgtcaccgatttcgatgttgtaggcgatctttctgtgttcagggttgttttcatcgtatttgtcggtcatgacccattcgtagacggcgaagacaccacctggttttagtactttatagatctgtgagtaacagtccttcaagtttggagcatggcaagtagcctcgatggcatagactttatcgaaggtggattcagggaaatccagattcatgaagtcacccttcacaaaatggacagatttggacaggccttccctgtcggtgtataggttagctcttttgatctggtagtcgttgttgttgataccgatcaatttacaaccggtgaatctagcgatttcgcgagcaggaccaccgacaccacaacccacatctaggacaagatctcctttctggattccagcacggtgggccaggacatgttcgtgtcttttgatggcctctgtgaatttatcgtttggaaagaatttacagaaatggaaactttggccccaaccgtattcgtagaagtcagtgactagattgtaataggagaaagtgttttcgttataagaattcaaacgacggttctcagtttcgttatctgtcttaccgtcccattgttccaggtagttatcgacagttttagcttgtaaagttgagtccttagaaatcaatttccaaaacaagttgtttgattcgatcggtttatcaccgtgtaaattgtcgacccattgtttttgtctacgtcttaattcagcagtactttcatcagtcattttttttttttctttaatgtgtctacaaaagtatatgtgtttgtgtttgtgtttatatgcaaactgatttcatatagtagttggtgcaagaagaaacacgagagcaatagaacagggtaggaaaaaggaaaaaacaaaaaacatggcaagaaaagtgagagaagaaattgcttagacataagacgaatataacatacaattgttacattagttaaccatataaaaactagaagatttaccttttctatcttatcggtatatatatatatatatatatacctacggagtatataatacaaatgagactatccagttataaaaagcgttaaagtacgagacgttgcggtaataagcgtcaaaattgtaaagaataaaatctcttccactctaattattttttttttttttttttttttttattttgccctcccactcgaagaagaaaaaaggagtaaactaaacgaagaaaaaaaacaaataaacaaacaaaggaaaaagaaaaagaaggcaagtcaatttttggtctgttctccgaaaacaaaataaaacaaaataaaaccgctctccagttgtattccgccaaacagcttccgccaatcggaaagttgttccgtccttttttattccgtctccttttttctttccttgatttcttttttattttttttttttcgtatatattttgggtagggtgtgtatgggtggcagcgactacagaaatcttcccccttttcttttttccttctgttgttttccctttttccctctccctttttttgttctggcaagtaaacgaagaccgccaaccaaacaataaaaacaattaaaaaaaaagaaaaaataataataacaataataataagaagaagaagaaaaacaattcaggttctgtgtcgtttgatttccgactccctttttctctaattttctttctgaagatacattgtggtttcgttgtttttaaatgtgaaaaaaaaaatacaataaaaacaagaaaagagaacggcagggtgtctagttgtgaaaaagggcacgtgcttttcacgtggctacagggcctcgcccaggtgtatggatgtagtctccagatcagtttccgtttctcttgtatgaattatgtaagatttttgttggtgggccagaaacagatttttcttatttttttttctttttatttatgaagatgatagggagatgaaaatctgcgacggaggaaaagaacagccacataaagcaaatagagttggcttctttggtttcttttccttttccatttattatctataggcttgatcatatattataatatatctattacatatatatactttttgtattttttttttttttttttatttctctccttctcttctctcttatttttatttataacacagtgctgacttctgtcttatgtactacagtttttctttgaaaagataaaaagactggaaaagttatcgatctcatctaatatcacatcattactcaattccataagccgtatacatatttaaagaatagagaataaaatagaataaaaatataaccactataataagctaatatactcactatgtctaccttaactacatcgtctaaacggtccttagatgatgcgttatcctctaatctacccataaattccactatttctaataacatcattagctcagatattatcgataataataatagtggaaataatgatacagtaactacaactacaaggagtaaaaaaccagcttctaagaaatctaaacaattggatccagaagcaagattgaaaagaactcaacagaacagagctgctcaaagagctttccgagaaagaaaagagaaaaaaatgagggagttggagaataaagttagcaaactgacagaaatccaaaaacaaaatgaaatagaatcaaatttcttaagagatcaattgaatctattattattagaattgaaaaagtataggccaactactgataatgacttaaaagttttaaattatttatctcaacataataataataataataataataataataataataataaagattctgttttttcttcttcttcttcgtctccttcacccccttctcctcatccatctaaatctacaataaaaacatcagatattaataataataataataatgatgatgataataataataatagtagtagtagtggtagtagtaatagtagtagtaataataccatacctactggtactattactgttaatacccctgataatagtagtagttggctagataaactcttatcagataatgatttgtttactcagcagttgttcgataataataacaataacaataacaatagtaatagtaataaattaaatattagtaacaataattcaccttccccattattcttctcaaataaatacaacgataatcaaatcatacctcattcaactaaagttaaccatagcaataacattagtactaatagtaatagtcctaataaggatccattgagttctgatgctttattagatttcgataatcaatttgatgaacaagtagccaatttctgtgttaagatgaatcaagcttgtggcacaaagactaatccaatacccaaaaataaaagttcagccttttctggttcctcaatatccactaatacaccattcacagatagtgtaatcactaattcaccattatcttcaacttccctatcattcgtttcaacaccttccacattttctaacgctatgatgaataataatatcaataatatcaaaactaataatgatatcactgcatctgtacccttcctgaattatgcaaagaacctggatatcaatccattcgagattgatacaaataaaagtgtggattctccacagttgacagtttgttcaacagatacctcaacatcaagtaatcaccttcataacaccttcaacagtactagcactgatgatcatatcaaggacaaagacggtaggagtacttttgatttgcagtttctttccaatgatttcgagattccgttcattaatgcagatttagcgttcccaaatattaataacgacaatgaagtgtttttcagagacactaatccattaaagggtactaacacaaacaacatactagacgattttatcgacgaagaagaaaatgtcatttatgataatggaattaaaattaaacaaaaattaccaactactctattcaatgaagttccatatactgttcaattggcaactagcaataacgtttcgacaaccatcaaagatgctactaagagtgatagtgttgttaatgatgataatgatgatgatgcagaagatggtgatcctcaagttgtaccatcaaaggatgataagatgttgaagtgttcagaaatttgggatagaattactactcatcctaaatattcagaattggatattgatggattatgtgccgaattaatggcaaaggctaaatgttccgatagaggtgtggttgtagacgctgatattgttcaagatgctttaacaaaacacatgcaatgatgtttcatttcgatattcctatgttatttttcttttccccttgcctgtttgtttgtctattttcttttttttcaatatatatgtatatatatatatgtattcgtatattcatatattctctagaatactattatggagttctggtagtctttttatttttacttcattttttctctttctaattgtgtgtgtatactctgttatactttatacattcttatgagtatatgtgccatctatttgtatatttatgaatataagtaaattaactatatgtatatgtatatatagatatacatatacatatagacactcatattcatatcaataactctcttctttatttttttacataataatacaaattttatcatcagcatcttttttagtatcatttgctcttctgaatctttttatctttaatctccacctttccccgccgctatgaacaatgccatcattatattttttctttctacgattcagatgataattactattcaacttactatttaaaccgttattactgtcgctgttgttacggttatcattgttattgttatggtaaggtacacttttccatctagcaatcttatttttcttttcagtaccgtgagctagaagtgaatcgttttgaagtgtcttaggagaatattcaccgatttcagaactttcattatcaaaagttatattacttttctttctagaggtccattcacccatagtattaattgtacgaattgatctatgtccaactgttgttgcattagaaattattctctctggtatatacatttggggtcccttattatcatcatatagtaattcaggactttcgtgttcgatatcatcatcactttcttcttgaatattcaatctgttgttaatatcttcagatatcttaattatttcctcaggatgatgtttattgttaagataattgtggtcattttgaatattgtcaggattgttattaccattactattattgttgttgttgtcacttgtgtcttgtgcagttattataggagttgtattgtcaacaataaccatagaataaaataatattttaggcatatcgtgaccaaattcaaataaatcttttaatgttaatatcgtcaaatcattcatattaaattgagaatcataaagaatccagtcatcatcaacactggctgtatttacgacgttattagactgtcggattgcagttaatatctctttattttccttgtataataagcaactctgtaagactaacctaaagtgtctgcctttatcgttaatagagattgatggtaagatagagtaataggaagaagtagatgaagttgtagaaatgtctgaaaaattagatgaggggtatgaactattacttttgctggaaataaatgaatttctatcgtcttcttcgtcatattgagggttagtatttgttggtatattgttacattggtctgatgaatgatttttttcattttcatcatcataagatatggaatgtttatcattaaggtttgttacgtcatcagctcgatcttctgatattaccattcttgttaacggatgtctgcaaagtctacgaccatcatcattatcatcataatcaccttggctaagtcctagttcattgtaagagatattctctgcatatgaatttatatcattgtcattataaaaactgttaattgacatcatttctgaacctggaggagtgaaaacatgattattactaacacagttgaaactattattgttatagttattatcaatgtgcaaatgaataagagaattatttatattcgctatgggtttgtgattttgaaatttttcgtttgaatgccgtatatgatgcaacgcagctcttggaaaattcagtacgatggaactttctccatcatcagagataattgaattgtttgttggaactgtaattttgttttttgtatttgaatgcatactatcatcactattactgttattgttattgttattgttattattgtagtgattgttattgatgtataaagaagaattttgttcacaatgaatatcattactattagttttacttgatttctcttgtgagataatgatattattagactcatctttcgttattagtattgatggttgctgtgttatttcagtttcacttaaataaaaactattatttgcttcattatctatgcccagacccaaactaacatcagtagttgtggtattggtggaggtctttgtattagtacttactatttgatgaacattattcttaaatttgttatatctttttggatccacataatttaaaaaagttgggtcattaaaattattcattgtatcaattagtaaataatggttttcatgactataacaatgatctttggtcaatttttggattttaatattattcaaatcttctaaatggaaataatcttttaagaaagtctccaaaatggaaatatcactatggatcttatcaggtattgagataaacaacaacttttggttcttattaaaatttttaatacttttgttattatagagattactgttcaaaaatcttcttaatagggtatattttaatttgtttgtaattaattcttcaaaatctcctgaacgtaaatttcgcaaataccatacccaaagaccattttcatcattgctataatagtcatctactttaacactcaaagtcatatttcctagagaatatagtaaatatgataaaaatgatattaatttattttttttttcagtgattgattgatgactatttttcctatttcgctttagttgagtaatttaataatattacaatctttataaaggaatggttgtgtaccaactatttatatcgggaagaaaagcataatggtagacttttattcaatctcatttaatcctcaatatcaaaataatgaaaatattttttttcttttttccttttttctttttcctttttcctgtttgttcgtctctctttctattactttattgatctttaagaaaatcacttgacggataaatcatacaaaaaaaaactcaaggcattaagaaagaaaaaataaaaaatcaattaaaaaatcaaaaatcaaaaaaaaaaaaaaaaaatcaaaaaaaccttttgttttttttcttaccaacgaacatttcctgtcaaaaaagaatagaaatttttgaggaaaaaagaaaacaaaatacaatagggatgtgctgcaagacaatagctgtgtaactttttggaaatcagatttattttttttttgtttgttggttttaaaaaaaacaatgaggaaaagtaatactgttcataataagcaatattgttttgtttttccggaattgtataggggaaaggaacagagaagataagagaaaatatgttgtaaccctatatagtacaattaaggtgaagcaattcttttttattcgcaataagcaagccctaagagtttttttcaaaaaaaaaagagagaacgaaaaagaacaataaacgtgataattgcatattattttcatatattgtggggtataaataaatagttcccaaaaaaattatgcagaatataatttctctttattgtaaatagacttttttaatatgtaatagttgaaaaagtggtggtaagggatgtggttgattatcccaaaattgtaattgtgtgataatatatcaaatacctgacctttcttctttttttttttgtacatcatattgaatctagtaacttcattatggtttatttttcgttatttatttcttcttccaagatatgtttggtcctaaactattttatttaatttgtttattaactatttgtaaggaacctaactggaaatccagtagatatgcaatttcgagggtaacacctaagtgtctgggtggaggattggtacagccatgtgcgcagtggcttgtataaggtattgaatctgattggaggatttccagggagcgatagttatatcagatcttgtcaagaggcctttgattattgagagataggctaggggtaatcatcttatttaaatacatcttagtaatgatattaagaagtaactcttaacatcatacaagaaaaagactaacaacaagaagaagtaataatacaacaccagggttattaattagtaatatatagagcttacgtaagagtgtttatacttatgctaattgatatgattcatccatctatatacagcaactcttacacatacatacaaagaaactaactattatttttcaataaccagtgatagattgtcacaaatactaagatttttctctatttaattgtccaaatgatatatttgtcttttaaagtattatttgcaatactcatatggtgttgttagaacctttggtctaattatcttcgcagaaactctagcaatatcccatggatcacaatatttcctcctgacatctgccacaacattgctgccataaaaatatatattacaaaaaccagcaattctgtaaatgtttttaaaggtttcttcttctcccatgggagaaacatgtttataattattcaaatcattgtggcaatgtttcaaatttcgaatattcaaaacatcgtggttaacagtgtcttggtcaagtgctagatgaacagcattaagaggatgaagttctaccaccgctaaacaacaatataattgaaataagaatttatcgcttgcctgaggctttcgatggacttcacgatggattgaaactttttgtgcaatcttaaaatcgggtctcaaggtcttatgatttgctcgtttagactaatatcctgaatcctctgcaatattatatgtcaatggttccttcactcgcgcagcatgattcacaagttcttcaacatgggatagtacaaatttaggaagagcctggaagttggcggagtttcttgaaaaatattacaggagatttaaaattttaacatatctagggtgaaaaccataacatgctagaaatggggctgtcttaatagtagattggtaggtattattgtgtgcaaactcaactataggtagtatatctgaccatttgttcccatgtggatctgaaatagaagtgatcttttctgccaaaatttggttaattctttcaacttaccaatcttcttaagagtttatgacctgtcatcatttgtaatttaataccagcacactgcgtgaaaattgtccatgcaatggatgtaaaagttttgtcttggtctgaaacaattattcgaagcatgtcatgcaacctgaaaattttctgaaaaaaaaaatttaattatgtcttctgctttcgcagatttcttgcaagcaataaaatgggacatcatcgtcagttgacaagtaaccaccataatattgttgcatttagtttttttatcaggtttcatacctgaaatgaaatcgatgtcaaaatgtctctaacgttccttaggaatcattaatggcatataagcgttaaattgtttaccagttctatatttagatttctggcaactggagcaatgacgaacatactgtttaatagtagcactcattcgaggccaataataatgaggggacaagtttgtaaatgtacgaaatccgtcattatgtccgcctgcagtagagtcatgagctaacttaagtagctcagttctaataaaattgttagaaatacataatttatcaacagttaaatcagtatatccatgatatagtaagtcgtcgatcactttgtatcttttaattatagtatccaatttgtgtagtaccggagctttattaactaagcaattataaattactttgaaagctgcatcctgttggtacccactctttaattcttcaatatattcaagtctgaatttggttaataaagtgacttgattaggaatactcaattcatataaatatgtatcataaccaaaaatcatccagaatatatgttggatttggttcaggattctggggagaaggataggatggggaattctgtggtgttaaaatttttgtgcctctgatttctttcaaatcaggacgacgactaaagccatccgctttatttcgttcacccttaatataaacaatctcgaaatcaaatgaagcaaaaacatctgaccaacagccaattttaaaactactattttttttttcgaatataaatattttagcgattcatggtcagtatatagaataaagtgtctgcctttcaaataatggaactgttacatcaaagcaacccaaaaagcaaaaaattttttttcaccagtaaattgatgcaattgagagttgtgaaacttcccacttgaataagcaactacacctaagtgacaacccgtaaaatcactatgctctaaaacaacatctatggcaaaatctgaggcggtagtagtaaccaagacatctttcgtttcatcaaatggtagtagaacaggaactgaagtcaacttctgtttcaacatgttgaaagcaaggtcacagccattattctaagatattagttatttattgacaaactcatataatggattactaaattctgcagattttggaatagatattctaaagaatgaatatgttgtcacagaaatcgaaacatcgtacacaccaataattcaatatctacacaactctaacaaattcaaaggaagattggagacatattactattgattttatttccagtatgaaacttaataagcaataaaagtatgataacataatgatgattatctattatttaatgtaaatgttccatttcattgcttataaaaaatcttataaagtggaggatattattcaaaaaaaattttttgttcaggaacttttcaagttacacaacaaacctagaataaatgattatcatgtaatgtatatggctattaaattacagatggcaatatgtcataatcctcaagcaaacggacaggttggaaaagttaaacaaattttaacagtaaatatcacttctgttttaaatccacacgggagtgaatggttaaatgtactatcaatgattgagtttgtatataataacatctatcaatctacaattaagtcaagtctacctttagcatattatcttcaggctcttcctaaatttgcattatcccatgttgaagagcttgtcaatagtgctgtgcaagtgaaagacctcttgacttataatatagcaaaggatcaagaataccagcctgaaagagccaatgctaaaaccctgagaccaggcttcaagattgaacagaatgttttgatccatcgagaagtgtatcaaatgccctacgctggtgataaacttcaattttaatagtttgctcctttcgaaatagtagagcttcatcctcctaatgcggtgcatgtagtacttaatcaagacactgctaaacacgatatttttaatgttaaaaatttgaaacattaacatgatcatttaaatgattatggcaatgttcctcctgtggaagaagaggaaatcctaaaaaacatcaacaaaattgctgattttaataatacctatttttataactgcaatgttgtagcagatgtcaggtggaaagattgcgaactatgggacactgtcagagttcccgtaaagttaattaaaccaaaggcccagcgacactatatgagtattggaaacaacacctcaatagacaaaaagatcgtctggacaattgtgtagagaaaaatcgtcaccaaaaaaagaatgaaaaaaattaagaggtgaagatttggttaatccaaaggtgacattatgacattctactctggcgattgacagataatagttttttgattatattgttttattacatttgtctattctgatccttattgtgttttggaggtgtagagatgaccttttaccaaacctctaatccttgaactcctatttttatttgtaagcaatctctatagatatgaatatcttttaagatatttaatttctctattatcgaattcttggagtaccaaaattgattattgctatattatgatatttgcaaatcctgatgattactaaaagctacagatcgtgcacgttggacaccattgtgttcatctctttaaatggtaattctaatcctttagtttcatgtaagatgatggaagctagaaattaaatccattagctgtgttttcccaattaggcccttactttagctttcagattctcacagctaatcgcttttattaaaattattaatttttatacagttaatttactgacaatataattgcaactcaatgatattggaatcttggtgggggatgatgtaaggagccctaattgggaattctgaaatacatagtctgcgggtaacgcctacctaatgtcgaggcgaagaatttggaacaactgaaactcagggcccaaggttgtaagtgtattcaaacgaacaaaacgatcctcaggtagacatttttaacaaattattgagacatagtgccaaaggtaattgtcggcattaacattcatactctatctaacaggctttacctagaggaaaaatggcctggataaaaactagaatatcagtaataactgagactgatctatttatcgatcaaaatcaaccaattatataatttttaagtgtttatatatgattaatattcatattttagtataccatttggaatgacccttacattaatctaagaataatgatttctttgaatcactacgtatttattctaaaaagaaaaaaacaattatgcgtactcgtaaaccaaacttctaaatagaaaacttaatttatgtataaattaagtgctaaaagtaataactctaaacaatactacgtaaaaaaaaaaatgattttacaataatacactaaagttttaattgtttccttgcgtatcctttaaaaatgactacaaaactgttcatccgataaaataacaacacatataatatagtcctgactataaatcacagacaagagttattaaaaatctagtataaaataaaaaagaatcgttaaataaaataaatgtcttgtagtttagatcagttcgattgatgaatgttggataggaaaaaatattttcaatcacaatagtaaactactctgagtgagctgagaaaaaattttcatcataaacaacaaagacattacataacaataataaacgcaacaattaagcacaacaaaaaaaaatcgaatgtgaaaactgactttattttctcttggtgtaaccttacaccatcgaataaaacaaagaaaacataattggaaaaatgacaatccacaggcatctggctgcactttcctcagattcacattctatcgaaatcagtacttcattgtacactgattctctctaactctacgacatttagaaagtgaagcagacacgcagaaacgggttcagcacctgaggccaatagataggttctttctacaaacattgtcgtatttaaactccctctttatttatatatgttttgttttagttgtatattttttttttcctttttttatgaaaaaaattagaaagaaatttcagtttcgtatgatgctatattattctttattcgttagggttcggacgatccatatatatatatgtatatacaaacatattatgtgactattatatattattttattacatatagaccacatacattgtggcatttacaacaataattcagtcaacctttccaattctgaataacaactatcacagtatttttgtaaatttgcatcattttcatataagtctttcatttccttttgaatcttatcacattgagatgtttctccaagtaaaaattccctataatcaccttgtatgatctctctttccatattttgcaaaatcttaagttctaccaataattcattccttctgattgccacatcatccctagtagcttgaaacttattgataatggaggaatcaccatgttgctttttaaactcctgataaactaaattatcggtctccaaggctagatcttgtgtcaaagcttctaaatcatctaaataaataatattctttctatttgctatgttctcttcatgtgctttttgagattgttccatatacgaaacaaatgtactctttgctcttttaacagcccaaaaggacatggtactcctaccgcttaagaatatattaaatagtatcgataaaaataatccaagtaataggattttgtttaaattctgaataattttcttcaatataataagcaaactgataccacatctaataacggacaacaacatattcacaattcgatacataatatgctttaaaaacactttcaataaaatcataaatgaatatctgaccaaatatccatctggaataaaatcctttttttgctcattcttattgttgtcaatctgctgttgctcctttctttcttgttcttcctcttcctctaaaatcactttctcctttttcttatcgtcatcctgaatatcaacaccaattaacccacacaatttcatggcttttatgaccttaccgtgatttccaattttttctaagtaatacctaattactttcctaactaatagaaattcaacattactgaaaaatacagcccattctaacaaaattttatctaaatatgtccatttttcctctgtaattatttcaccagtttgtttattaataaagtcaaacttataaaacatttgaattactgaaccacttgtagacattcttagtcttgtttcaacatggtctttgggagcaaaagtttgtgttatacagtatattactttaactctaagataattgcacattggtaatttaatataagttggtccttgctctacttcataatatatattttcaacagccttcacaatactttgtttcaaacataacgacttttgtttaacattgccttgactaatttttccttttctatttaacaaatagtgggttacatctatagggaactttaaataacgagtcaaaatagtatcaccatcacccttcttcttattttgttcttgtttccaaaatgatatatcaattgtagtagtattagaacttgccaaaaagaaacaacgaggaaatgcagttgagctatcaccaaaaagaatgtgtatcaatcctttactcggaatattataatcatgtttatagactatggttgaatgtttcctaaaatttcttaatctagccaataaatccgccacattccccattttccaaaatgttatggtttccaaaaattcagttcctttaaaatctttattattaactgaacctaatataccttcttgatttcttgttacaatttttttagcatctgattcttgtttggtttctaaagtacccacattcaagttatctgtgacttcagattctttaacttgttgatcaatagcaacaaatttcttaaatatactctccaaactagtcactttatgagaaactttattctcaattaaagcctgcaattttaacactacagcctttctttcagtaaataaaacatccattttatattgaacattttctacatcataaagaattatacgattcgaatggtctttgtcaatctcaacagatataatatcatcagtattcagcttagttaaacatataaaccccatggaattcatataacaaaacaaataatcctttgtaacatagcataccgatggaaatctttgttttgcattaggataccaaaaagaattaaatttgaataacaaaaactcagtcttcattttcaataacctttggtcaatgatataaaacacatttttcatttgtacatcatcaatttgtaattgtctatcataaaaagtagggaaaatttctgaatttaccatcgatagtctgttatgagctttatctaccacagtagatgacctcatttgtttgctctcacatagagaatattcactccaatttgtggtcccccatatattaaccaagataccattagggaaccaactaccacgagtaaaatagtttgccaatatagccaactgtgataattttgtagtcagaggagttgcatccatatgaaactcaaacagtttcccgtctggtaaattcaaaacctcatactctgaaaaagtacaatttaactcatcgagtaaagatattgtttcactatcaaatgttgtaatagcctgatctattgatgtggtagtactagaagcaaattcaaaaaaccttggggaaaatcttttgtatgcaatttcatgtgctaatgtactattatttaatgttccaatgtacttttttgataactcaaatgtatttaaccaaaattctaaatcttttaaggtttctgtttgaaaaataatcttaatgttgttatttttagaatcatttccatggtttcgataagaaatatctgtattatatccactaccattgattattttaacttcaaagcaatattttctattttcctccattgcatgtcttacttgtgttaaaaagacaccaaatttatcagtttcttcaacgtatatctttgaaggtgacaataagaacataccaaacacaccattttgcaaaaaacaccatcttctgacccatacttctctgttatctttacctactgtagtcttcatatgtaaccatccagacttttcaggacatacaaaggggactggtaaacttttacaaacttctactgcattatgaatatttgttatattgtaatcgttgatatcttgagaaggcgcataaaaattactagcatactcaaatatttgcttttttgcatgctgaatatcatttcttaaagcttcatacccttcaactgcattttggacccattctttataatcgttaaagtattttgatttagcagatgaaaataacccaatatctggattttttgtggataatgtactatgtgcccgggaaatcaaaacagaaatagagtccagaaagtgtttctctagattcaatttcacttcagacattgtttcaattaaatctaatgatgctgttagataactttttcttatttcatgtaattgttgggcatcattttgaatattttgtggatccaataatttgtttgtaaccttaatgtcttggaatgaattcaacatattatcatattttgtttgaaaatattcaaaagtttttcttttactcttataaggttcaataacatttgaaagcaaatttataattatctgtgaccgtgaattacttgttccaattacaactttaataagaaattcaaagaatttcttatattctaaactggattcagatattacagacggtgtaaatgtttgattacttactaacccattagctaacatcactggagatggaaaagctaaagaaacaatagtctctcctacacgttgaaaatcatcaaatgcagtcttaaacttctgatcataaaaggccatagttgtttgtaacctgtcctcgaatatctccattcttgtatgaaagaaattcacatgtgccctaaatgctggtgaatccacagaagcctctttaaattccactgatataagttttaattgcttatttttatgaacacccatatttttttgaacattactattacttttgttatggtccattactttttattttattatagtgaatattatattgtgttatatgataattaaggttacaaaacaatacctcataagattactcaaatgaaatggaataacacgaaaaaggaatatataaaataaactgtgcgacaataaatgaggtaattgtacaagtagtattttgagtagatcttgttaaatctttttttccttatataatgtaatacacaatctgatttatgttccacaccttttttccactaacttgaatagttctttatttaaagatctgcaagaaagcagtgaaaaataaaaatacatcaaaaaaaaggctaaacagaaacaaacaagacaaacgttaaaaaaaaaaaaaaaaaaaaaaaatagaaaaaattattgaagtcatcgaaacaaaatgaaactcaattttattggtttactaaatctatttataatactagtatttttttagataaaaatgagcagattacttttctgtgatccatggaagacaaaattatcaatttaacaaaacaattgacttttctttaaagagatcactaaacaaactacaataaaataaaagctgtgtaaaacaatcaaagtgctatctataaatttccttgaacagtctttgaacctgacagcaatgtgttcaagaaggctaaattttcatacagctaatcacttaggtcccatatccgcgtctagagataaaatctacatcaatcaattgaaattacaaactattacaggtccagatttatggaatgcattaaatacacaaaaatgtcatgtatccctcagaattggcacagattttagtaaatcctccaccacagacgacttaaaatactctttaaattatgctgtaataagtagagatattaccaacttggttaaaggaagaaaagattggttacaattaagcaatttgacgaaatccatatatgattttacgacttccaaagatcgatatcgaggtgttaatgaattagaagtttgtgtaaagaatctagattatcatttaaggactcctcatatttcatgcattatgagagaaccaacagaagaaatctatgagatccataatcttgaattatttacaattattggtgttttcacttttgaaagactacaaaaacaaaaagtgtctctagatataattattaagagtcctccaggtttagataaaacttcttccttgaaacttatcattgataatatagtggaatatgtggaaaagtctaattttaaaactgtagaagccttggttgaatcagtagggaaagtgatctctcaatcaatatcttcgtctgatagagatcgaattgaaataactgttaaagttataaaattaagtgcaataacagataccgatggtgttggtgttagcactacaaaaagtgttaaacaattggatttattaaagagtataaaattaaaggataattctatggataaatccacaaagtttgatttacctgtagaacaaaaatttaagcaaataagcattgttaacaacgaatggaatacagcatatttagcatttggctctaatattggtaatagggtcaaatatatactatcagctatcaatttgttagacaaaaatcctaaaatcaaagtcttaaatacttcatccctgtttgagagtgaaccaatgtatttcaaagatcaaaattcatttatgaatggatgtttacaaataaaaacccagttgaaccctgatgaattgcttactgtttgcaaacaaattgaatatgaagaattgaaaagagtaaaacattttgataacggtccaagatgtattgacttagatatcatactatacttaaacagtgagggtaatcatgttctggttaatactgaaaatttaattgtaccacatccaaaaatgctagaaagaaccttcgttttagaaccactaagtgaacttatcccatcaactatgttacaccctattacatctgaaccaattattcaacatctagaccaaatatatgcaaaattaaatgacgcggattatttgactaaattaattccattgccatcaataaataatagctatcgttttttgagattcaatactagatatgaattgaatccaatatcatcacaagtgatcagaaaaacttcatctcctacatatattatgggtataatcaataatactccagattccttctctgatggaggaaagcattttaataacattgacaagaaattagacgatattataagaatgtgtaatgaagcatttaaattacaggaaaatattataattgatataggaggttgctctacccgtcccaattcaaaacaagctacatcagaggaagaattatctcggtccatccagttaattaaaaccattagacaatgtccacaattaccacaagaaaagattgttctatctattgatacatacagatctgaggtggctcgacaagctgttttggctggtgtagatattattaatgatatttctggtggcacatttgatccagcaatctttgaagttgttgcagaaaatccttatgtggcttatgttctctctcatattagaggtgacattaacactatgacacaattaaatcattatgaagaaacagaaaacttgaatgggacggaatttttatacaatcagatagaaaagaataatacacaaactcaatttattagatcaattggttttgaaatgtctcaaacatataggaaagctgttcaatgtggagtgaaacgctggcaaataattatggatccaggattaggatttgcaaaaaatggtaatcaaaatattcaattgatgaaggatatcccattactcaaaaattattcatttttcaatgaagatactaaggaatttactaacttcaaaaatatacctgtattagtaggaccttccagaaagaaatttattgggacaataacaaaggaagaagatgcctctaagagagactttgctactggttctgttgttacatcttgtattggtttaggctgtgatattgtaagagtgcataacgtggccgattgttctaaagcagtgaaaattgcagactctatttacaaatatttgtgaatgcaatatttttaagttcaatttcttcttattattattaatatcgaaataaaagatagatacaattactctttaaatactaattaatgtacaaatatataatgagatttagacagataaatatacaaactttaatttgtgaagatcgttacccacaaatatatcgattctcattaagaagtatgcattttgatttaaataaaacaaaaaagaaaaaaatactattttggttataaaatctataggatattaacaaaagagtaataacacagaatgatagtaataaatagaaatattaatattcaccataaaaaaataataaaacaaaaatataaaaactgatgcctagaatcctagaacactatcttatatttcaaattggacaatctctggagatgtgaccaggttggttgcaatggtaacaaaccttctcggcagcttcatttggacaatctgtggaaatatgaccgaatttaccacagttgtaacatttagattctgactcagtacaatctctagctaagtggttaaaaccaccacatttataacaggtcttaccactattgtatctgttaccaccatgatggaatctaccctttcttggttctggacattctctggagatatgaccagtttggttgcagttgtaacaacgttgaacagtacattcacttctaacatgacctgtttcaccacagttgtaacattgcttgtgttcaacagttcttggttctggacattcagattgaacatggccaggtttgttacaattgtaacataatttttcagaatcacaatcgtcagctaagtgacctaatttaccacaaacgtagcaggctttttgagacattcttaaatagagaccttctggagagttctgtcgacttgtttcttttttctgggcaagagcctatcctaatataaaagaacagtgctttcgtcacgtatcaccttaagtaaaccaccattgaaccatatttatgcctgtcgactgaatccaatgtatccctcattctatcaccaaaaaagaaaaaaaaaatttttttctttccattcggaaatttcgtacagaaagatattcaaacgtcattaaacagagtctgctcatgactacagaattaggaagaagcaagtaactgttaagagattgtaacacttatcgatactatcatacatctggtatacacacttcccacggttctaaaggctcattatctgtgactaatgtcccatattctctggtagcttcaaagatatctaacatctctgatccatagtctaataatgtttcaatatcatcagaatttaaatcctttaaatgatgtttgagacgatatctaaaatctttattacctattttcatttttaatattgctactagtgtaagaacttctggtgccaatacgtatattgcaaaatccttcgtcccccaccactttactacaggcgacttgttttgagttaactcctttttatatttatgaaaaatttgttcaccaacaattgtttgtcttttccaaccataaaatcctgcaagaaatttgtttaaagatgacatggatatatcatgtagggaaaaaaatggtttactagattgtctgctcaatgcttttgcttcattgtagtaagatgatggcatggtcccttccaaaatatatttcacaatttttagaactggatcacattgtttaagtaatttgcctgaatccactgaaggtgggatattgtatttagatttgatttcagtttttacttttttgattatatctgacatggaaatatccttaaataacgatgtattttgtttaacaaatggattcaaattgtcaaacgtttccgtccttgcagattcaataagtaatttccttttttctggagtaattctcttatgggaagatgacacaatgctctcgagtggtttcaattttgtatactggtcctttattttcatatcaaccttttttttctttattaatttcattgtttcaggatgattattcaatatcacttcatcattagatgataatgtcgtctttcttttcttccttaattcttgtattgtgaagacatcattatcattgccattcttatttaaaccaaaatcagtattaagtttcaatgtatcttggtttacattattttgaattttgctcgaagtttcaattagtgatcggatcttatgtcttcttttagcatgcattttcaattcttttaatctagaatcaccacaatcagagtcctttaaagggcaacttttgaatcgacttccacttctaataaggtctcccattccttcacttggtactataatgttttgatatatttattttcttcttccttttctattttgatttttaacttttttctattaaacttggtagtacccaaatatcctttctctttgtacctcaatgaaacacgttctattactatagacactcctccccaaaaaaaaaaagaaaatttatcagactctaccttattgtaaaacttatatcacacctttaagattgttttgttaattactggaataatttatcattatattcatacagggatttttttctatatctttttctttcaattcattttattgtagatcactttttcttatttcctcttttggattttgacgcagaaatcttttgagttatttaaaaagagaataacaccacaaacacaattgcaatgataagtatcaattagaaaatcgttcattattgcgtcctcaaaagaaagaagacaagatcaaacgggctagttattccaagcgaactattattaatgattttatctaaataaaacaaggcaatatattggaatacattaatttatttaaaaccagaaaatatcgcaatgaatcaaatgatagattttttagaacataaatcaattactccagccttatctgactatattatcgaattatatttaaaagaagtattagaaaagggcaaaaatgtccacaaaatcgaagatgatagatacacgaaggttatttctcattctaaatcaagatttagttcttcattgcaaccaaatgaaattttatctttggagttccacccctcaggtagattattagcatatagcagaatggatggatctttgacaatatgggaagtaccctcaaatggtattttacacacaaattcaagtaacaagatttttattaataatgttgtaggtgcagaaaaatcagttaccgatatatcttggaatcctcaagaaacctcacaaattgctacaacatcaaacacaaatgaaattatcatatggtctcttattggctctaaatttagagaaagtgaattaagcagagtcaaaacagttaatgtagaatcacataaaactaaaatcaataaatgttattatagtcctcgaggcgaatggttactagcaaccacaaaatcagaaaatttatatttattctctactagagataatttttcattaaaatacatcattaatttatcaccttatctgttaaatggtgacattacatattctactacatggcataatacagatgattatttttttattggttgtaaaagtggtcatatattggtattcacattaaaaagactagctaaagataacgaagttaagtgcatattaactttaaattctcatagaggttcagtgacagatttaagaatggatccatacggtagatatttgataagtggaggatctgatggtatgtgcattttttgggatttaaatacctttacctctaaatttaccttaaatgatatcaatgcgttaatattgtccatagatatagatcatttaggtaagttactagtgatagttacttccgaagataaacttttgttttataatatgtccaatggaaatcttattagatcccttactattaaagaattaaagtcagatatatggttcagatttcatccaaataaaacatggtttatcaaatctacacgggatgatgttttgtataatcatatttctcaagtgaatgatgaatttgaattttggaaagataagtatgaacaaaatttattaactctgcggagcaaaaacaaaaatagtagttctaattcaaatatgaatattaatggacataataatatagacaataaaaaacttagaaacttggatgccaaatctcgtggtagtgttgatcatagtaaacagattacagaaagaggttctggcgtaactgcaaataaaattcgcaaaaatacatcatccacaattagaacacagaaaagatttggtataaggtatgacagaatgaacagggacagaatgggtatcattccttcacgatcctcaatgtcaggtagatttaataaataaattctgaggctctttatatttaaactttgtattctgaatgatgaataatataatataatgccgacataagaatataaatacacaactcaaataataaatgtttgtatatttacaagttagtagttattccacatacgtatatatacatacatatatgtgtgtgtgcgtatacaaataaataatatttatactaatgacaatttaaagagacattaccaaagaatatttggcatatctttctcacttgtctattttttttctttttgttacattgtcacttcgtttcgtatttatttatctaaaagaaattctgtgttgtcataataatctttttttacaaaatccttaatttcatctctagtcaaccatttaaattcaatatccttcatcttaggaacaaactcacctgtcagaatccttgatttaataaagaattccaatgattcatcatttttatcttttaaaaccttaacaggttttcttgaaacagtccaggtattaatcttagacccaccaatatctcttaaaccagattcagccacttcatgcaatgcataatctgaattgacttcaaatgaaggaaatttccactcatcgttaggtttaattttaactagtaggtataaagtttttcttaattgtctttccaaacttgtagtatcattagattcatcagctttagtgatgattgagtttttaaccactggtctacttatactggtatcattggctggattttcatctttaggtattataacttcttgtttagtacttctttctcttccatgcctgatatctggaataccttgaggataccagaccccaggttgttttgaaataggcttcttttgagcaatttgaaacttgtattcagacattgtaccttttttaaagtaataatatgctgggaaagtccacatcaatctcttctccaattcatatttatatttaatgtattgagattcaaattttgttagatcaggaaccactattggacttctagccaaaattaatgcagctcggatagtttgtggtacctttgtagccatattgtcttctttttcctttttttttttttttttcttttttgactatctatcttacctacctatttgtcttgtatttctttgattacctgttgcacgcagtttttatcaaacgtcctaatatcaaaatctcaacgatatttccaccaatcacaaaacaatacattatgtaagttatgcaacagaactttatttacttactctttaaaacttttagaaccagtataaataatctttaaccctttacaaataaataaccttccttcctgcctattttttttctgtatttcgaaggactttgaaaaaagtaaaaaaaaaatagagataaaaaaagctaagaaaagctagaaaagaagcggattgaaatcgatacaaaggcactttctaaacaagaaagcatgaaatccattatggatggcatatttattagtataaaaagtattcacacaaactcataaaatgttatatattacaataagacattgcagggatagacttcattaactaaactacccccctctatgtcttgcaagatcagattaaaaagactttcatatgtatatactaatagaaacaatttatacatgcatattaatggaacaaccaatgatataaaatagaaaattaaacaaaaagatagtatacctgtatccttcttcttgactttcttgtctccaaatgtcctaaaatacaaaaaaatgcttcattcaatgctgttgctgttgatttagcatattcattaaagtatttaattgtgcttgtggatcagctgcctgtgcttgttgttgttgggaaggtggtggtgctggtgcctgctgatttggcaatgatgtgccacccatttgcccctgatgtaatatttgttgtggagattgagacataccgtatccacctattggttgtccatatacaccattttgacccatgtaaccaccaccttgttgtggtggtaattgattgtacatagtatttggttcagcaatatatccactttggactggttgatgttgattgtattgattataaccattccgtctttcatctctattagatcttggaccgtttttagacgaatccgtaggtattctttgagaaatagcttttgaagaaacaccatcacctacaataatatctggttcttcaaataccataccaggtgttaaaggctgtccattagtcccaccccattgcgcttccaatgaccacttcttgtcagcatcggttagtctatgtaagggaattatactgtacccattttgataatcgcagcaatctctaggaccaaaaccaacaccccaacgtgttcttaatgggtaagaaccatctaaattaaaattcattaacacattttctgcctcacgtctagaataaaccttgacaaaggcatgctttctatggttatttaaaataacactctgaacatcggcgtatggttttagaatatgggaaatatcccactccttcatattcattggaacaccaccaagaaataaggttctactcaaaactttaatagcatttggaggcaaagaaggatcatatgtaacaggtttgggtctactatgtggattttgtggataattcatttcgtctggatacagatgatgattgtttggaccgaaattttgttgtttacgaccaaaacttgaatgttcattagaatcgtaaccatgattgcccttttgaggtggtgatcttgatctatttcttctagaggagtacctttcatattgacgttcacgctcacgtctgcttccatactcggtaactttatgtgaagactgttcaactttgtttactgtatgttgtgattgttgaatatgtttagctaattgaatttgcagagacaataataatttacgtaaagcagtttgttgttcagataaatcatcagatactaaggcatctgtaacatcaacgtcaggtacaaaatcaagtggcttcaagttattaattatagttttggccctttctttaggattttcaggcaaaagctctgttttgtcggaatcagaactgctattattaacagcaacagatggtgatgtattacgagataatgaatcatccatagaaaaacacttagctcttacagcatttaagtaacccttttgaaataaaccagttctatcccagatatcaattagcgttcttattttttctctgtgatctttatttcccttagaatatgcagtggttaataagtcttgaatagattcacctaaagtataaacagcatgcgcagcagaacctttctttgcagtaggtttaatgtaatcatctctagcacgagcctcatctaaataacccctaccaatggaatcaataacatacaaggaacccaatttatgagaatcgggacaagtcttagaataatttataattgcatcaacaatttgttcctcttgatcgacattttcaagagcaaatgtagtcaactttttaatacgagaaccagagatacctgattttaattcccgaaaggattccaaggtatttacaaaatcttgaaaagtctcagtttcactcattttgtgattgttaacgatattttattgaagagaattattaataaatatagctttttctcttattctccggatagttttctaatgggtcgtaatatccaactttcaaaaaaaaatcctttctatgctttatctttcacaccttctcctaacgaattatgatacgattatctatatatatataatagtagaaatatacgtttttaaaaatattttcctttaacaatatttagtaaaatgaagtaaggaagaagaaaaaaagtgaatacgaagttaataatgtaaggatggaaaatgctaattgacgttgtattactactttattttatttgtattagtttaaacttttgttttactctacctgcttttcaattaaaggtatatataatgcacgcacttaattaaaaaaattaaaacacgattacaattattctgtaactactttataacacaatattatatattgattttattttaaagacactaagtgaaatatactgcttcgtatgtccagtcgtaagacttgtcagctttgcttaagagagagcgctgagtcaagagtagttaagacttttacaaaggagaaaacgaaaaacctcagggcaacatctcataatttatctcctttatatagttttttcaggacttcatcattttgtttcaacaaacaagagaaaaaaaaaaaaaaaaaaaaaaaacaaaaacaaaaagtgaaaggaaccaaataaaaaaaatatcagattttctcagggtaaccacttttggttagaattaagttagtcagtactacataacattaagccggattaacctacaaggaaaagttcttaatagatatctgtaacgaccaatgatacctcgatagtattcaaggataagattattgacttactttgcttaatagatatatgtctagttattgtgaaagagacagaggttatcttggttacgacattaaataaattacaaagaaatgagtgccatccataaactctccattcaaggtatacgatcatttgattcaaatgacagagagactattgagtttggtgcaccactaactttgattgttggtatgaatggatcagggaaaacaacaatcattgaatgtttaaaatatgcaacgactggtgatttaccgccgaacagtaaaggtggagttttcgtccatgatccaaagattactggtgaaaaagatatacgtgcccaagtaaaattagcttttacaagtgcaaatgggattaatatgattgtaaccagaaatattcaactattagctaaaaaaactacaaatacatttaaaacgttagaaggtcaattggtggctattaataaaagcggagagaggaccactttaagtactaaatctttagagttagatacacaggtaccattatatatgggtgtccccaaagctattctagattatgtgatcttttgtcaccaagaagatagtctgtggccattaagcgagcctagtaatttgaaaaagaaatttgatgagatattccaagctatgaaatttactaaagctattgataatttgaaaacaattagaaaggacatggttgtagatattaaattattaacacagtctgtggagcatttaaaaatcgataaagatagatcaagaactacaaaaatgaaaattcaccaattagaagctaaaatagatgaatatcaaagtgaagtgaattcaattgaagatcaactgaataaagttactaaagaatcagataagctttttaaaacaaatcaagattttcaaaatattttgtcgaagacagaaaatttgagaaatctccattctgttactctgaacgaaattgataggttatcacattctattgatatagtagatataccttctgcagaattaaacagcatgttggagaatttttctgaagttttagagaaaaaagaaatactgattaatcaatatgaagataaattattttcaattaagtcaaagcaagaaacactaaataggagcagagaagtattaataagaaaagaagctgagttaacttctcaaaaaaatacttacttgcaattaattgaaaaattaaatagttcagtagaccaatttagctcaaagtacaacattacctttgataaaaccatctcccaaacaaacacaaataataatcactttgcattgtgtttaaatacattagaacaacattttcaagacttaacaatacagctgaaagatttgaaaaaagctaacaatttagaactggccaaattagaagacaagttaaaagctaagcaatatagtgaaacagcgcaaatccagaatttacaatattcaaatcaagatttatataaattaaagcagcaagtaatatctttatcaaaagatatagaaaatacaacaactttagaagaagaattaaatcaagctaatcatgatcttaaagaatataataaacagttaacaacctgggagaaagatgaacccgtaagtgtaattgcttctcaaatcagagaaaaaaataatgagttgttatcagttgaaagagaggtagaaggccttcaagataaaattttgaaagcaaaccaacaaactgatctttttgcaaaactagctgttattaaaaaaacgttggaggaaaaaaaattaatgttatttaatttaacgacagacttagaaaatgccttgtgtttgaaaggatttagtttgaaattgtcagctgatattgatatagaatttaagaaagtttttattaacttacaaagagatattgctttatctaacaaagaattaactgttgcccaaaaggaatatacggaaaactcattttgtttaagtacactagaaaacgaccttaagcaaaacttagaaaacaaggcgacattaataaaccatctaaagggaagtttacctgaaaattgcagtatcgaagattacagtgatatacttttggaagcggagctttcttacaagactgctttagaaaatttgaaaatgcatcagactaccttggaatttaataaaaaagccttagaaatagcctatcgtgataattgttgttatctatgttcacgagaatttgaaaccgatgaatttaaaagtaaattactctcagaattaagacgaaagacggattctaagtttgaaatgactttaaaggagacagtagaggaagaaaagaaatttttaaatgaattaagatatttagaaaaggatataatttctctaaacaatttatccaaaaaaataaaagaatttgaagaacttaaattaaatacttcaaaaagtgttatagagtctagagagaagctttcacgtgtggaaaagaaaaataccaatctcaaagaatctcgtgattatggtgaaaagatattaagcagaaagattgaacgatatttagatgtatcaaaagaagtgactgaactaacttttgaatgtggtgatatctcaaagaaattagaaggatatagtgatgagaatggaaagattgaaactatagatgaactccaagaaatgcaaaaatcaaagaatgattttatgcgtgaattacgtaatgatattaataatttgcaagagatgagagaaagaaagacaaaagaacataataatatcttaagtaaaattaatgaaataaaaatgcacattaaagatatggaaaaatccattatatcaacaaagaacctacaaatagatattgataataaaaataaagaaattgagagtattacattaagagtagagaaactatctactgaagttaaagagttaacagcagaaagaaaggatatagagcagttgcttaataagaaaaaagaagaatttcaaaataatactgatctgatatcggatagactagaaagagttaagaatgattatgattcttttaaagtagattatactcatatacaaaaattccaagagcatggatcaaatcaactagactcttgtcataaggaaattatgaaaattgagagggaaattagagaaaaccaagactcaatagaagagttattgaaaatgttgacagaacagaaagaaaaattgagagattcaaagaatgaaaaaagaactttaaaagacaatttagagctattaaatttaaaaggtaaactaaaggagattgaaaatcaaattgagaaattggacattaaaaatgcagaaattcaaagagatatatataaagaagagtctactcgacttcgctcattatatgaaaaattgagcgcagataatgctggaaaattgggtgagatgagacaattacaaaatcagattaattctttatcaagtcaactaacatctgaatataaggatattgatgaaagatatcacaaggaatgggttaaattacaggcgaatatttttgttactgatgatattgatacatattctaaagcattagatagtgctatcatgagatatcatagtttaaaaatggaagatatcaatagaattatagatgaactatggaaacgtacatatagtggtaccgatattgataccataaaaataagatctgacgaagttaaaagttcagtaaggtcaaaatcatacaattatcgtgtagtgatgtttaaacaggatgctgagttagatatgagaggaagatgttctgctggtcaaaaagtattggcatctattataattagattagcattagcagaaacatttggtatcaactgcggtgtaattgcacttgacgaacctacaaccaatcttgatgaagaaaatattgaaagtttggctaggtcattaaataatattattcaatttagaagacagcaaaaaaatttccaattaattgttatcacacatgatgagaaatttttaagtcatatgaatgcaattcaattcaccgatcatttctttaaagttaaaagagatgatagacaaaagtcccaaattgaatgggtaaatattaatagagttaatgaatattagcaagtaaaattatcattgaaacttattcaatatataactttatgggttattctataactaggattcgaatatattgtgcaatacattggacagagagggtaatacattcatttactcattatacacagtgattcaataaattttcaggataatctacggctattaattatatattttaaggagtatttgtaaaagtgcctctagttgtatataaggaggtggctaagatattttactacatgtaattcttcttactaattcataagattagaggatattaaaaaaataatctgtaattaatgtacttacttattgttctgaataattgccatattttcttctagttaacgttaaaatgaaacaaatataatataacatatatagaacactgtgatatatataattataagtacatgtttctaatatacaaataataaaatagtactaatgcttattgtagataagtcctattatttccaatattataatattttatattgtttaaaatctatctttctttttagatacaatcattattcacttttgaagagacaaatcatctacctaggacctcttcctcttctgctcatttcaggtaatttgaagggaacttttaaagtagcaattttataagtggaaatttctgccttactaataccgaaagcttctgcttgtgcgactgtagcactcttgacaacacagccaataattctgaataaagatgtgatcttagatggtttgaggccaaggtcttgagcaactggggaaatttccacaataaagttatctaggtgtaacattatgaccaaaatataacataataatttatcttcactgtgtggatccactaaaaaggaacggttcttggatctaccaaaggcaccttgtctagcaacagtaaatctttctaagataccatccaccaaactttctggaggagaatttagtttttccattaattggtctttactacgacatcttctattttcataaacaccaaaaagtaatgttaaataatacaataactgaattttcacaatttgagatggttccttgaaaatatttagtttctttttaatgtatttggtagattttggaatatatgggaaaaattctaatttcttttcaatatctttctccttcaagataccattaacacgaatagattgtagctctctagaaggtattatgttttcaactggatagatttgttctacatcagtggcatcaacgttagccaatggagttggtctatcattggcaacagcagtttccatttcctttctagttggtagacctttggaagcagatttaacagtatcaacgatatccacagcaacatcgaccaatttatcggaatcaacacgatttctttccaagtctgaaatggctttcttagctttctttgtaccaaaagcttcacctaaagcattccttaacacagatccacgaacttggccctggtttttaatctttggacctgctaaatcccttttactctttgagacaactttagacaccaagacaggagctttatataagtcaactgaatttgtttttttattatagacaccaacaaggtactgtaaaccagctgtagattcagaatctgtttggccaatgtattctaatctattattttcaccatgtaaaatatattgatcatctgaatatttattacgatataatttgaattcagtatcaacgggggcatgaaatcctttgaaaaaacttgcaacagcaatcgatggttcggattcgtacgaagaaatatcaacttgggataaaggccttttggacatctgtaaaagaaagaaaggttaatttattagtctcctgatataaagttctttcacttagttcttattgttttttatatttttctaaaaaaaaaaagaatattgaatcaaaataaattctgaagactgaaggtacacacaaaagctagcactaaatacatcaacctaaatcatgcaactgaaaatttcgtgtcaaactttttcaactttcagataatataccatacccgtttaccattagagctcttaaatttcatctcatctcatctcatttttttttctataggtaaagaaaaaaaaatgtaaaaaaaaaagaagttttaatgttcgtgtgaaatgccctggattttttttatttttgttttcaatttttttgtgttcgagaaagtcattctatcgtttgaaacgataaaagcgaactcttttcactttagatagattttgaagcagaatttggtcaattggtgaatttcgaatgttgctggttgtccaacctcattagcagtgaacgaattattcaaattggcaagaggatctggttaggttgtttattgaggggtctgaaaacattgtaataacaaatttttcattgttatagcgatttattgatttcccagttttcctttcttgctttccttagattttaggtaatttctcctttcaaatgagatgatttgtttgaaacacttgaagtggttggagtcagtaattcttaggtccgtaatgtcaacttctacttctgctactactgctaacaataaggttattcaaccaaaatggcaccaaccacagggtgctaattctgaaaagcctgttttaaggttatacaacagtttaactagaaataagaatgtttttgtccctatcagtggaaccaatacagttacttggtattcctgtggacctactgtttacgatgcctcccatatggggcatgctagaaattatgtttctattgatataaatagaagaattctctcagactattttggttatgatattcaatttgttcaaaatgtgactgatattgatgacaagattattattagagctagacaaaactacttattggaacagtatattaaaaacaatggctctgaaaataaattgatttcaaaagatataaaagaaaaagtaactaaagcactttttcaatatattcaaaaaaatttgaagcaagattttaatgttatcgaacaattctgtgaatggagagacaaaattaattttgaagccgagaaattggctaacccaaaatttcctatgcatattactgcagttgaaaatactattaaagctttgaaggaggactgtgaaagtgatgttttttttaagctagtaaaagatacttttgtaccattgctggatgctgaatctggctccacagtgaaagatccagaagtgttccgtaagttacctgcctactgggaaaaacaatatgatattgatatggctaagttaaatgttagaccaccaactattactacaagagtctctgaatatgtaccagaaattattaaattcgtacagaagattattgataatggatatggttatgctactgcagatggatctgtttactttgacacagtaaaatttgattcatcgccagatcatgattacgctaaatgtcaaccatggaataagggtaagttggatttgatcaacgatgcagaaggttctttatcgaattttggtactaataatggtaaaaaatctaaaaatgattttgctctttggaaagcctctaagccaggtgaacctgaatgggagtcaccatggggcccaggtagacctggttggcacattgaatgttcagtcatggccagtgatatccttggagaaaatattgatattcattctggtggtattgacttagcattcccacatcatgataatgagttggctcaatcagaagccagattcgataacaaacagtggattaattatttcttacacactggtcatctacatattgagggtcaaaagatgtctaaatccttgaagaatttcattactattgatgaggcattacagaaattcacatctcgtcaattaagattggcatttgcttcggttcagtggaacaaccaattagatttcaaagagagtttaattcatgaggtcaaatccttggaaacaagtttcaacaatttctttaataatgtaagagcattaaagacagattatgagcatgcattatcccaaaatcaatatatttccaagaagttgacctttgttgaaaaacaattattgtctgatttaattgttactaaagagagagtgcatgcttctttttgtgataatttgtctaccccacaagtcttaaaggtacttagtgatatggtcacttctaccaacacttatataaaaaatgtgggttctgagttaaagattgaaccagttattgaagtctgtaaatacgtcaccaagattttaaatgtgattggtttccaaactcgttctgaccaattaggttggacaagtgattcagcagatggtaaatcatttgaaagcggatctttggaagatacaataatgccatatgttaaagttttatctaattttagagatcaggtccgttccatggcaattaagaaagttgataatgttgaatatttgaagttgactgattcagttagagatcatgatttattaaacttgaatattgcattagatgacagaaatggacaaaatgcgttaattaaatttctttcggataaggaaaaggatgaaatgattaaatttatgcaagaaaaggaggccagagaagaagccaaaagattaaagaagctagaacaacaacgtcaaagagaattgaaggaaaaggaaagaagagaaaaggcttccgtatctccattagagatgtttaagaataacaaattatacagtgaatgggatgagcaagggatcccattaaaagataaagatggtaatgatgtaactaagagtatgacaaagaaattgaaaaaacaatgggaacaacaaaagaaacttcatgaagaatattttggtaagattgatgcataagttgtaaggacaaagcaggctaattcacaaattcacataaacacataaacacacactttgaatatgtggagtgttttttatcaatgttgactgagtaatatgcatgataatagtgttgtataatttataaaaatcgtataaatagaagtgattttacataaagtgcttcaattataatgtaatgagcaaatctacacaaacaaaggattccttaaggttctgaaatgtttttctatgattgaaagtttcatatatagacctccgttctcaatatttttaaatagagtattattctgtgtaccaaaaatagaaaaatattgaaaatttattgaatgggctgaaattaaaaaaaaatcactagctacttctacaaattagaaaaaataatatatagaagtagatgaacggattttcttatttgaaagaaagtagtagcgttggcattaccctagataattgatgacttacttgcatttatcaaaaggttgttatttagatcaagagtaagaaaacaaaaaaaaataggagaattaagtttaaattagaaaaatagaacatgagcagtagagaagagtatgtattaagtaatataatacacatggattattttcaggtaatgaaaagcagtaacataaagaaaagtattttactaacatctccatatgtgtatccgttgatttaattatatataaatatatgtgtgtgtctatataaggataacattattatttcaatattggtagaatatcaaaagctcttttgggtttagctgatacagaagatgctgtggaagcaatggaaaaggaaattgagttgtatagattagagaaaatgaggccgatctattccactcgtgataaatttattgaaaaaattccatctttttggaaagttgtactttcgcaacattcaaattttgccaattacatcagagcatcagattttaaatatgtggattgtattgatagggttacggtagattgggataaagatggtaattactcaattgttattaaatttaatggtattgaagatgatttcccaagtcaaacagttattaaacccttcaaattagttaaaattgaaaatgatttgaaaggagaaggaaaatcaaatgatgaggatgaggatgaagagttagatgaaattgaaaaattgatcagcgaaccagttgatatcatatggccaaaatcctatgataatattaatccagcaaagattaaagataagaaatctgcagagggtaagaagaactatagaactggtatgaaaacaatatttggttggtttaaatggactggtttaaaaccaggtaaagaattcccagacggtgattcattagcagaattatttgcagaggacttgtatccatattgtgtgaaatactacacagaggctcaacgtgatttagaagatgaaatgagtgatgatggtgaggcaggtgatagtgctgaagaaccattagacatttccaacagtgaattagaagatggtgaagaatcagatgttgaaaatggtagtaaggctaaaaggcagcgcgtcaattagaggaaaatgctatccgagacgagaatattgggaattaaattttattgtccatacttttataggaatcaatagaccaataaatgaatacaagggagctaactaacatgaatatatattgatgatgtataaaaagtgaagggaaaaaaaattaaaaaaaagaccatatatgtatatatgtctgtatatttgatgtataattaataatctaaagaattgtgtttttttgatgcgatatggtgagttatttgtttagatattgatttatgatttgatttgttgattgtctgtgttttctttttagtaatttttcttggtgtgtgtgatcccattttagggttggataataattttgccatgggatcatcattactataatcaaattttttatcagacagtatttcagattttaaagacacaccagtgccaacagaggaagttaggaacggattttttgtggcattattattattactgccacacaagttttgattatccttatcttttattattgtggtatccaatttttttttacccaataaataatcttcattttcctcaggtaaattatctttatcattgtacatccattctaagccatgtttagattttttcactaagtttttttttaggtcaggatctcttgttgagttaatcagttcagttaattccctttctctcttgatttctttttgtctttgtatgaattttttttcttctcttttaacttcttgttccctttcccatactttttgtctattcttaagaagttttgggttccaagattttagtagatttaaatcaccagatcccataataacaaaatagaggtgaatacgaatgtttgtaagtgaaactaaactgaaatgacttttgtctctatatatatcaaattattaatgaggatgaaactataaaggcagaataagtaccaagatccatagtaaaatggcagatattcttatattcagcataagcattttgatattttaattatacacaggcatacacaaagggaaaaaaaaataaattttccaaaaaaaaaaaaaaaaaaagaattgaaaagtggcattttcttgaaagcaagaaaatggagacaaagtataatctgaataagatgacaatactgtatatacgtattctatataagcgtatgtatgtagaataacatatagtatcaactatttacataagctataagagaaattttaaacggataggttcatgattagacaaatggactcttgtattcattagacatataaagataaaataatagaaaaccatgtataaaacacattatatatatataatgtgtatttatttataaatgaatagatagctatttatacatatacatatatatgtatatatatacatattcctgcttattttttttatatgtgtattgtgttttattttccctttggttatcataactgttattaatatcacaatttgataccatatacaacttaagatgatgaaagaaaataaaaataaaatattaaaagtaaacttaaaacttaaaagcaataatagagaaaaaatagagaagttgtagattcagaaaccgtgaatcttgatgttcttcttttgtaaacctaattgggaaatcataaattcacaaactttagctctttggtcaccttgtagttgaatgatttcacccatttcagtgtccttaacgatattaccattacaggcaaaatcttttttcaaaacttttaaaattctctttaagtcatattcttctggaacaccttgaactgtggttaaagtctttctaccatttctttgttgaatacgaatatgaatgtagttggaagtagcagtttcatcatcaccagtatcggcaaatgggtcaaaagattttaagttttcaatagacatataaactaaactaaaattaatttaccttttattgaatagatgatttattatgtgttatcttgtttttttttttcaaaagaaaacaaacaagtaagtcagcgtaggttaggaaatagaataaaaagagtcaatgttggttaagtgataatacatacacatatacgtatataaaataataaataaatgacttgtagacagaaaagagcaaaatgattgtagatggagaagtaagaaaatcttcacgctagtggtggttattcaaaatgcagctaagttagcaataatttaaatttatcaatcttttttcccactgatttatttaacacaacagacaacaacaacaaaaaaaaaaaaaacaaaaaagagagagaaaaaaaaagcaacagcaaaaaaaaaaaaaataaataaataaacaaaaaaaattgctgtgtatgtatgggtgttggaatttggggttaaatatttaattttcttttttattcggggaaataaaaataaaacatagggtaaactcagtttttctcagggttaaataatatattattgagggtttgacataaaatattaatctaaatttcaacattttcccattcaggctttttttttttgcaatttttttagtggctgcgatttctttttttgtccatttttttttccctttcccaatagtcgagtaattaattaaagtgagttaagataaagaaaataaaaggtcgattaaaccaagcgattaaaagacaggtgtcaagagtttataatgcagggctgtcatatgccctggtgcatgattctcatggtatactaatcattctacattcttggttgttcttgttgaataatttgattagccctaaagctacacacacatacatagatataaacatataaataagtaatatagatacatccatatagaagtagatatatctatcagacttgatattatacttttcaatatcgctaaaactatgccactaactgaatacgatttgcaaaaaagtttgaaaaaggcatgttccattgaagaaacagctccaaagagaaaacatgtcagagcttgtatcgtctatacatgggataataagtctgctaaacttatttttcacatccttaaatcacaaccttacattaatgatgaagtccaattattcaaaatgttgattgtgatccacaaaatcattcaagaaggtcatccatctgctctgaaggaggctattaaggagaaacaatggattaaatcactggcaagaattcattctactggttactcttcatattctaaattgattaaagaatatattagatatttagtaaacaaattaaatttccattctcagcatagaggtttccataatggtacattcgaatacgaagaatatgtctctttggtctctgtggctgatccagatgaagggtacgagacaatcttagacttaatgactttaatggataatattgacgattattcacaacttttatttgcatctattcaatcagattcaagaaatagtgaatgtaagattgcatctttaattccaatggtcgctgaatcatatggtatttacaaatttgtcacttctatgttaagagcgatgtatagacaattaggtgaagatgatcctgcattggccccattaaaggagagatacgaattgcaacatgcacggttgtttgagttttatgcagactgttcctccattaaattcttgacctccttagtaacgatccctaaattgcccactgagccaccaaatgtgtctaaagtcgtagaattagattctactgtcaaagatgtcaaatttgaaaagagacctcaacaacaaaaggagcaaaaagggccaaatgaactacctttgaaagaacaaacaccatcttcagctccttctttaagtagaaatgcctccttgactttcatttcaccggtcgcaactagtggtacgatggctcaactgattcctactgtaacagctgcagcaaatatggtccctatgatgacaggtgttcctgtacaacaacagcagcaggctgaatattgggcacaacaacaacaacaattagctaatgaacaggcccgtttagaacaagaacatcaaagacaattacaagaacaacagcttcaacaacaaatgttccagcaacagttgcaaaatgctcaacaagagatgatgcaattacaattacaacagaatacacaacaacagaatgatttgattgcattaaataaccagtatgaaaaagatcagatgttattgcaacaatacgataaccgtgttcagcaattagaaaatgagattcaaacgatgaatgagaacgttacatcgcaactggctaataaaaatgatcaaattagctctctacaggatcaaatggatatttggcataaaaaatatgattctttagccaagttatactcacagttacgtcaagagcatttgcaattattgccaaaatttaaaaaattacaagttaaagtaaatagtgcccacgaagccattaaacaaaaggaacatttagaaaataaaatgaagcaaaaagatttacaaatggctgatttaataaaagatcgtgatagattgagggttgaaaatgataggattgttgctaacaataaagaacgtgatatgcaacttgctgaaaaaagtagcatgaccactgaagataagatggctttgattatggatgcttcattagaaagcggaattgccacaattcaagaagctgtatataaccttgatgctcaaggtagttggattggcccattgacaacagcaaaccatattattacattaatagaaggctgttcagaaaaggctacagagtttgctacaagttttaatgatttaatcgtggatggtatgattgaaggtgatcagccaactgtaattttcaatattagtgaatttagtattaatgttgcggccatggtaacgaatgtcaaagccttttctactaccaccttagcagcagaggagtctgatgatctaattgaacttattgaaaagtgcgcacgtgaagcacaatatttctttgaagatttgatgtctgataatttattatccttaaaagatgatgaagctagaacagatgcagttattaacgctaatgttgatatgcaagaaaaattacaagaattatctattttcttggagccttacttaaacagattgccaccatctacagaagaaaacaatgcccattctgaattagttgcaactgctgaaaatattgaaaaatcctcgcaagtcttacgtgttaatgttgatgtcaatgtgccaaaacctatcttggatctatctttagttattatcgatgctattgtagcattagtcaaatcagctattgaatgtcagaatgaaattgctacatcgaccaagattcctttaagtcagttctataaaaagaacagtcgttggactgaaggtttaatttctgctgctaaggctgttggtaatgctaccaatatattaatatctactgctggtaatttgattacagataatggaattgatacttccccagaagaatttattgttgcatcgaaggaagttgcagcatctacagctcaattagtggcagcctccagagtgaaaacattgcctcattccaaggctcaaagtaagttggaggattcttctaaaggtgtttcggttgcatgtaaacagttagttgattatgttatggcaggtgttggtgggtctcaagaagaaaaaccactagaatttacatctgaacatgctgtgaagacatcagaaatggaacaacaagttacaatcttgaaattagaacagcaactaaataacgcaagaaagagattaggagaaattagaaaacatgcatattatttgaatgatgataacattgaataaaattgtatataattatatgtataagatataatattaagtgttaaagacaatgaatatttgaaaactgttatgtgaaaaaaaatatatttcaaaattttataatgataaataaagtatttactattgatatgaagtacaaataaggctatttaagacgtattctttattaagacaatcaaaggtattgttaactttttttagatagatatatgtatactatttgaaatatgctgaatgttattaaataatataagaaactactatgtagaaaaaaagtttgaataattatataaataatgattgtttttttaatatgaatggttttttctttttgggttacgtattatttgttattgtttctttttagtatatctaccttttaatacatttaaaaatgtattctctcaatttctaaaacattcattatgtatctaggttttttttgatagtttttttcaagaagttctaactggaaattcagaaatatatattttctgggcaatacataagcattattagatagaattggagccaaattatttagaaactcattcaagaaacttctgattattaaaacaaagtgttcaatgtaattataattattaacatccatggtaagaataagcattatataaatgatttataattgatatacacattatagtattttacttgggacaactttctataaaacttaactgaattcttgtgaatacgcatttttacacgtaacgtctgagattttggatagaagattttgtatagtcgcatttacagtggattttatgcagtgttaaatcttattggaagattttcagggactaatactaatgtcaaattttgttcaagaggtctttgttgtttgagatatattctatgggtaatgtatttaaacacattctggtactaattaatatttaaagataacccttggtatacaatcaataacaataaaaaacttaatgatgttacatgaaggttgctggagagttttatataaagcttaagtaagcaagtttacaatttgcacgtatattagtcaatataattcatgtatttttataccacattgattacaacctttgtacttttttttttttcaaaagtaataaaagttttttatgtttaaggataaaaactgtgaagttagataacttttcgtttgaaaaaattacttttttgtatatttatttaagataagtagcctcctataacttacctactaaccgaaaaaatccactaatttattttattaaaataaaatattctaagtctatagaaataaattagcaaaaaattatttaaatcccaataaatatgatatattataaatataataaatatcaaacatgaatcatgttgaaatagaatgttctataatgaaatagatagaacaataagattttaacagacactaaaggataaattattgagtaataatcattgagaggtcaccaaaaattgttgagtttgtttattaaatatcttactgttcgtagaggaaaatggcttaatattaacatatataaagccaaggatatcatcatacattatttttatcttatttataatctttgtatattattatttctatgttgtatatagagaaagaaagagaagaactttattataattttgtgtactaaatctgtttaatataatattgagaatgtttactatatatccaataactacaggcgctcattctcaacaaatcaggagagtaatacataaaaattggtcatatcaaataaaagaaacctattaacacgaaaattacaacctaaccccttattttaagttcactataatttacttataaaacataaggatgttagacaaaagtattaagtgagatttgctatataaaaagcaacagtttagtaatattgaatttttatccatactacttatttgacaaacaattataatattcaaatatagtattttgatacatatgcaattaaagaattttttttcaaaaataattacagtataatactgaatatacacattaataaatataaagttaagaatgttcgttataaacaacaatataagtgcttattcttgctgtattcctaaattcatatgatactatttacatattctatattctctttcacttaggcaaaaaaattaaagattaataagaaaaggtacttatgaaacagcttaagctaacgattgtgaatatttacattatttgcaaatatatattataacttaaatttttctttcttatttatacattgaacaaaaaaaacataaatacaaatataaataataaattacaattctttacaaggtacagaaagaatatgtaaaactctatctttatcttcttttcttatactatttttagttatggaataaggtttttagtcacatttatctataaataactttcaccagtatcaacaatgttgtcattaacagtatttgttaaattatccttaattattataagagttaccaatgtatatttctccgatatttccaaaaataataaatatccaaacataattattattagccatatattaagttataagttttatgagtgtggcttctttcactcatattagtatatacatatatatttgattaaaatgtatttttgaatagccatttagattttttagtatactaaagctaaacgaaatcaacaaacagagaaaatataattaattttaaactctacaaaaatgtgaccaaaaagcttaaagataactgacaagaaaaataattgagtgtatgtaaaatatagttattaaaaagcgtcgataccaaagaccacatatttaatagggattcattaaaacaaaaaaattcttataaatattataagtaaatcttaacctttgttgtataatatctgctaacaaggtcaagtggatttttatctaactgttttttatatttgaagatatattggctatactcctcattctattaataaatagttaaatgaatttaaaaaaaagtaaatcgtattatcaacacaaaaataaacatataatgatcaaatattcttttttttataactataattactttcaagcatacaaaaactaagtaaacctactaactgataaatgctttctaatatctgttatgttcccaattatgcatgtaaaattgctttttgtattgaaattgcaaagaaaacatttccttgatacaatattatgaacgagtataaaagtaaactttaacaaccacaaacccggaaaggttgataaaagataagtactaagatgcctcgtttcttcatattcttttctatttgagtttatgtcaccccacaattattttttctgctttttacgtcatttgtgtatatacagatattttttattttttttagaaatctgaaaaaagcaaaaatgatttaacgcataaatcaacacaatgcatacagattattagataaagcaaaagaaaattggagagagtgggtcgcaaaacacatttacataaaatgcaggctaatgaagtttataaccttctactgctctcacaaaggtacaaaattcaagttactgaataaaaatatatattattaacccatggatgagaacaactttaatacaataacataacccgcttttttaatatgggattttggctaccacaaaatttacaaaaaagacttttattacgtgtactacaaaacatatctatattttctactttagatttatcgaatttagatatatctcttggttctaactctaaattttcctttactaatatcaatctctatgtctctgagctacatattccctattttgatgtcaaaaaaggtacattagatcaattggatctaaagttgaatgtttctggtggcctagacatcaatgggaaaggtattcattttatattagttattaaacatgaggtacctaaacaagaggatattatattttcactgactaagagtatccaaaacttaacagaatctatacttgacttctcagaaacaaacaaaaacttaaatagtcaattaagtaagtccagtgaaatatccaacagcaacaattctgaacaaattccaggagctttcaatacaatattagggagtgggtccgagttagatccacaaaaatcaactagattacaaactatgagaaataaagttttaaacttgatattaaataaaatgataattgttttacaaaatataaccattaagattgaagataccgttggaaattgtcaatatgaaatatcactagatatgatatctttgttatctaaagaggataatcttcgtcaaatgtccgtaaagggattatccatttttaataacaagttagaacaagaattatattatgcttcaaaactatcaaatatgtctgtatatatgagtgcagtagagtcacttagtgaactacataataaacaatttactagagtgaaacttctaacgctagattttgtccaactatcattccaaggattgtctactattgaaaatctttctatagctaatgttacaattgatgttgataatattaatgtatttttatcagatatcaccgatttaaatgacgatgtttttatacattttgttagaataattaaaaggtttttaaaaaccaatactagacaagatgataaagaacaaaatatgtctcatgcagagacaaaaagctctacaacatctgatcttctatcatacatctgtgttaagactatgtatttacattttttttatgataatattattgtatttgaacaattatatttaaatcaagttgacaacagaaatatagttttaaatatcgacaattttaaaagtactaaccaaaatttccaaattaaagtagaaacaaaacctataataaagggcacaatctattccaattcaattgtattaaaactgaactctagtttggagataaaagtgaatagaaagttattcctggctctaaaaaatttttacaaacagttccgaatgtttgcaaatcttatttcagaaaatattacttctcttccagacagcataattattgaggaaaagaagtctgttacttcaactagtaaatatttaataataactggggaaagtatatcgttaagcattgaagaacatgagtatattacttcgttgattctagattcattttcatttgacactaaagaatggttatttaactgtaaaaaactatctggtttattaaataataattgcatcacagaagaaataattagcataaacaacatatccattcgacttcatgacaaaaaacaaaaaattacaacattcaatgaaacactccaagacatatatgcatttactaatctggttattcaaatagaaagtataataatttatatatcaaaagatcaaatccaaatattccttaatcattttgccccgatattatatgaactatttcaagagttcaaatccgaagaatataccactaaaatacagccaattaagaaagataaaagaaatcatgcatcaaagaatattccaaggaagcataacttaatatgtaatcagattatatctgtcaatattatcaaatatagaattaaagatatttttaaagaaacttctttgggtgctataaaaggcaaattaaaaaataatcttttccttttcccaagtattgaaaatatgatcctattcatatccaacaatattgaattgaaaagaatattgatagactcaaaacaaagtgaaaatattattcagtcaattccatattcaaaaaagaacaaacctagcttatatattcatatccctgctcgtaaagaaaacaacaaatgccaaatcaaattaaataatattgaaataacatacaaagcaaaatggttaaattttttcagagaaatagaaacgaatgtagggaaagagaatgttcaaagaaaatttaaaagtccccacaataatttatttcccacgattgagcttttatttattgaattttctttattattacacccgtatcgtctgaatacatgccttctgataacatctgattaccaaaatattcatattgaatcctttgatactttacatattaactcattgactaaaaatgcgaatattctattgactgataattttaacaaaattataaaagttgaaactactaaaattcgagatctaacaaatttttacactagccaaggtttttgtcttattggaaaagcaaaaaatgtcaaaatcctaactacagatattaataataaaataaatacgacaataaccattgaacgcttgttattattattatgtgcggattcctttcattctcttattcagacatgtatcgatcttaaatatcctgaaacatttcctgatgaaaagaaatatcaaacttattttgatcatgatattaatgttttggagtacattgatatgaacttctttagtaaagaaaaaagcgacactttaaaaacaaaagacttggcatctcaatcaaagaaaaatacacttaatataatagaagactttttagatagagcttctccacaacaaactgtttctaatgaatttacatacaaaaataaaacccaaacagctaataaggaaagtttaaaatacaaccataactatgctgaaaaaataaatattagttcaaaatatattgacacacaaataacaaccgaagatttaaatgagagtaaatctttaagacatggtaataacttatcaatatctataaatttgcatattaccaatggtcttataaaattatttgatggatatgattgggcatatgctagaaaaaaaatatatgaagaattatcaaaattaaattcaaaatcatcaaaaattaaaaaatataactatactgatgatccaaatacttctaaaaaagaaataaacttatttaattccatttacataacaacaaatccaaacattgacattgaaaaagctgtagtggaaagtatacagggtcagttactaagtaattcagtgcataaaaaacaaatgaatttacatccatcaaaacattataaactactaataaattttgaacaagctactataaacattaatcattttaatacaaaacctatggatgctgttcaagaaaattatgcatttgatattatgaattctgttgatatatctttgcagtcatttgagattattgataaccttgaaacttcaacatggaataaatttgcttcattgttacgacatgaacactggtcaatcaatgacccaatgttacactttcatgtagatatggtacgtccattaaactatctggaggcaatagagtatattttgaatgtcaaaatttctcccttaagattacatattgaccaagatacgctagactttgctattcggttttttagtttccaggactcaagatttgacttaattgatgattaccctgatactttctttatacaaagatttgaaatagatcccgtcaaggtcatattggattataagccaaaaaaagtagactatgtgacactaaaatctcaatattttagtgaactaatgaatttgtttactataaatggttctagtataatttttaaaaaagcaattttacatggtattaatggatttaagtcactaagcatggaattacaaaagatatggaaacctgatattttaaaaagacaaatgagtggtgttttagaaggcatattacctttaaaaacatttatatctttggggtctggtgtgaaaacactcgttacagtactaacttcacattataatcaagaaactattggcaataacagtaacaacacaaatctacaatggaatccaaaaatatatttgaaaacttcaactggtcgatttgttcaattaagtgctaatttggttacaggagcacaaaacttattagaaaatactgaaacattatttggtggtccaggatccacaaccagattaactcacgggaatgctattcaaaatgtattaaatatgaataaaatactgaatgaggaccaactaattggaaacgataaccctacagtaaaaggcaatgttccctcagcattggttattgacaccactaatgtgcaagatggtaaagtcaaacctcatgttgttagtttatatgccaatcaaccattgaatattcaagaagggttggaggaagcataccgttccttggaaaagcacttacaagttacttataacatgatttggaaacaaaaagatgaatatttacagtcgattaatagcaccagtccttcagcagcagcagtttctgttgcaaagattgcccctattgctattatccgacctttgataggtaccactgaagcaatatcaaaaactcttcagggactagctaatcaattggatcatgataacattgatgaactaaaagacaaatacaaaagtggaaaataaatgaaaactattatgaaatcaggaaaacatatttgtacaaatatataataagataaaataatagcagcctgaatatagtattaatattccagggagtaatcaacacttttttttttacaaaaattaacttagttttatttatgtattattgttactgacattggataatctcttctcaactcatccatgtaatacttatgatccaacaaatattactttagctcttttggtcttctaaaataaaacatcctatggtattttgtaactttatcattttttgtatacaacataatacatttatacaatatcatagtaataggcatttatatcaaacttacctagtacatacaaaatcatttcaaaaaaggaaattttttgtaagagccttaaactctctgtacttgatttactctaatcaataagattttgtttgtacaatctatacctatactcaataattttttatagaaggatttaaactttttttttctaaattatctaaataaaactggagagctattttttaaatataacacctaaaatactaaactctatattgattatatttttattatgtatgatgctttttaacatataaaactacatatacatacatatttattaagaattctaacggttcataagttttcaaaatgatttataaataccttttactaaaatgtgaaagttataaatttatacaattatatttgtttatttctgccaatcgagccaaggaaaggggtgtgatatgaaaaatacaatctattatacattagcttctgtgacttgtttattaactcttgtttacaattttgattattttaaaacatgacaaatgtttacctggaactatttgatctcataaaaaaaatgaggtaggaatatagtagaagtaggaacaatttgtgtattaactggaccaaagacatgcatacttcttttattctactgacacaatacaaagaaccaggatgaattcaaaagaaaaaatctttttctcatgttttacagattattttctttattattttaacttatttttattttatattattttatagtggcctaattctttgcctttttatgtgccgaatcacattaccacttacttcccacagttacaatatcctttgaagattcaatagcatggaactcataacaatatgaattatcatgagatggggaagacaaaggcaataagggatccaccatagataaggactcataatacattttttccaacttcattgtttcttccttacgttgcgatttacctgatgaaattgtgatgagaccaccaccgttgatacaaccaccaggcgaagcattcacctctatgtaatctgtcttataaggatccgcaaccaagctgttattgtcatttgacatcggagagattgcagtaatattatgtgaattctcagatttatttaatttcccccgtttttttaatatagcaactcgtctccttggggacttaccattttgattcagatttcttactaaattttgtatatttctaaacccacttaattcagcggatgaagcaacggttttctttgtaatattatctaataacctatattctttgatattactatttctacctggtaatactacaatctcggtgtccgggttaagtgactgcattgctcttacatattgatatgcccaaccaccggaggaaccgcccatattagtggaccaattgagctttgcatcccatcccaaaggggacaactcttgatatagggaaagaatattggcagtatgagtgttaggtaaatattttttaaggtttggttctttgatttcatctaacatgcttaaaaattcttttggtgtaataacacaatctacttcacctactgaatccggccttgatgcttctaattttttatcgaaacatgccattacacaaagatgatataaatttggattttgtgcttttagtagtttcccagtgatctgttgtggtgatttaatatttaccaaaagaggcaccaattcaccctttgttttctctgtataaataacaaaccccggacatattccagagagccttggtctatgatcatcatttgctttcaattgagatttccattggataacactatcaatactattttgaatagatatattgcgaccaatttgtaaccccattacatatttagcattaaatcttatcttgaaaaagttcataaaacataaatcaaattcttgaacagttaacccataatacatagccatattaacacgacattgtggtgaaatagtgactgctagacgtttctcttgtaactcttccatatcttttaaaaagacagtatgtgattgtctctgtaacataatctcctcacttgatgtaatacaaccggagcatgccaaacagtcagataatgttatggtcaccttttgtactgtttctatttctttaccaacaacatattcaccatttgaatcgacactatctggttcttcatcaactctagtaggcttagtacataccaatgctggactaataaaatcgcttaagtcttcttctgatagtaaagtagacatcttttaaactatgttgtctctttctttcctctcttcttcttctttttttttccgacttcttcaaccagtctagtgatttcttagattaatattgatgaatcttactcgatatgtcttaaactgtttgttggatctattcaactacctaaaacaattccaatatccatcattctatacatgaaagaactcgacaattcttccaaagcaaacacggtacagaatacacagagacaaaatgggctactgtatgataatatatatatatatatatatacataaacagatacatatacatacatatatttatagatgtatgtggacatacacctatagcaatacaaaattatctttagtccacacaaacactcattagttcaatccaactgactcttactcaatgctgacaaattgaaccaactaaaagaaaaaaaaattcgcaatgactctttctataaaataaggaaaaaaaaaataaaataaaaagaaaaagagaattaacaacaatcactagcagcagaaaacatttgtttgtcttggaaggacctatataacttaagaaagacagtgtgtgtatagacagatactaattctagtttgatgcaagcaattcgtcacatctcaacttccacaattaaccgttcaatcatgtctacgtctttagatattacaaagttagctctattaaattccaaattaaaagaagatcctgttcacaaattggcctctactgtgctcaagaactataatgcagacgacttgctattagataaaagacgtcttgtagaacaagataaacgtattttcaatactcgtatctctatcgaaccagcgcctgtcaccaatcaacgtgcctctggtagatgctggttgtttgcagggaccaatgaattaagatgttctgtaatcaaagagttaaacttaaaagaattcgaattatcacaagcttatctattcttctacgataaattggaaaaagctaactacttcttagatcaaattatttccacacgtgatgaacctgtggattctagactagtccaatatctgttagctgctccaacacaagatggcggtcagtacagcatgttttggaatatcgttaagaaatacggggtccttccaaaggatctctataatgattcagctttttcaactacttcttcaagaaaatggaattctttattgactacaaaattgagagaattcgcccaagagttaagagactgcgaagaaacaaatttaactaaattgcgtgaatctatgcaagatgagatattcaaattgatgactctatttatggatttcccaccagtggcaccaaatgaaatattccattgggagtatcaagacaaggacaagaaaatccatatcatagaatccaccccgttagaatttgccaccaaatattgtaaattggatttcaacaaacctcctgtctcactcattaacgatccaagacacgagtatgggaaaatgatcaaaattgatagattaggtaacgtcattggtggtgacgatgtcttatatttaaatgtggacaatccaactttatctaagttagtagccgaaagattggccaatgataagcctgtgttttttggatctcatacgcctaaatatatggataagaaaaatgggattatggatatccagttatggaattataattccattggatacaatctaaaacaagataaggcaaatagaatcaaatataacgaaagtttgatgactcatgccatgctaatcactggctgtcatgttgaagaaggttcagaaattccaactcgttattgtgtggaaaactcatgggggaaagattctggtaaagatggtttatatttaatgacacaagaatatttcgaagaatattgttatcaaattgtggttgacttagaagatttaccttctgaattggctgaaaaattcaccacagagaaagagagaccaattgttttaccaatttgggacccaatgggtgcattagcttaaggaattgttgtcatttatttatttatttatttgtctttccatccccatagtatttactatctagacgctacaattttcaacagtatatagataagtgtacaagttttatcttttttgttgtaaatcacttatatctttgcaatgtcgaacttgcattctgtatacaaaaatttaacaagatatcataacaatttgtgtgaattaagcaaaaattggaaaagtagaaaacagacaaaagaaaaaaaaaattgaaagaaaaaaaaaacattacgccataaagacaaactttaaggaatgtttcgaagtttgaaaatatgaaacgtatttttattatgcgacaacattagtaccctcacaaggctctttaatggatacatgtgtttgttatagttaaattgatttaacaagtatacttatttgtggttgtatatttgtatagatttgtgtttatatagtggttgggatcaaattgaaaaacaaacaaattaaccaaccaattaattgaacggacaatcattcatttgatttaatttgctttgttagctttgtgttttgtttttattctagcagtgatatcacaatttctgaagatattgtattaagaggaagaattacctgtcattgaaaaaaaatagcataaaataaaataaaataaaataaaactcaatagcatattatagtatcactacatctatagattgaatttaattagcattgtcaattttagtaaaacataatttttctctctctttttttttcatcctccctctccccctgctccctcccacattttaactataccaaactatagagctttaaaaacgacttatctcttttatcatagttgcttttaacttataaatccttggttttgttcttttccattttttttttttttgatgcattggtccaatattaatatacatatatttggaatctacttattagcagcagccatgtctcagataattccagataaaaatcataatgaaagacaatattttgcaatcgaatcgttaaattctattgatagcatattaaaaaaccacccaacatggcgatttgaacatgacgtcagaggattagaaaaccattacgtgttttctgaacctctcaatgtaacaccaaacaatttagtaaagagatctgattattctctagcagaagacattatatcatttcaggatttacccctacaaacacatttagttaaaagagttcctataccagcacctcctattgattcaagtatggtcccaatgaaaaatgcagaagatagattaaacataaatgatccaaattttgaaaaacagtggcatctgtttaatccaagttacccaggtaacgatataaacatggcagatgtatggtataacaacattacagggaaaggtgttgtagtagctattgtagacgatggtgttgattatgacaaccctgatattagggacaatttctcttctcagggctcatgggattttaatgataatacaaacttaccaaaacccagactatctgacgactatcatggtactagatgtgcaggtgaaatagctgccgttaagggtaacaatttttgtggcgttggtgtagcgtatgatgctaaggtctcaggattaagaattttatccggtccattgacagccgaggatgaggcagcatcattaatctatggtatgagtgtcaatgatatttattcatgctcctggggtccgtcagacgatgggaaacatttgcaaggtccaagtatcttagtgaaaaaagccttaataaaaggtgtcaatgaaggaagagacaaaaagggttccatatatgtttttgccagtggcaatggtggtcatttaggtgataactgtaattatgatggttatacaaactcaatatactctattacaataggtgctatcgaccataaaggtttgcacccaccatactcagagagttgttctgcagtaatggctgtcacttattcatccggttctggggaatatatccattccactgatattggtgataagtgtagtgatacgcatggtggtacatctgctgctgctccattagccgcaggaatatatgcacttttattggaagccaaccctaatttaacttggagagatgtacagtatctatctattctttccagtaaggaaatcacaaatcaagatgccaagtcacaagaaggcgctttagggaaacgatactcgcatgtttatggatatgggagaatagacacaaagaatcttattgagatggctcagaattggagtaatgttaaacctcaggcctggtattttactgattataaagaagtcaatgaatctacaaataatccagataatattattgaatctattatagagattgatttggagacattaaagaattcaaatttagaaagaattgaacatgttacaattactgttgacgctgaaactaatattcgaggacaggttaatattgatttagtttcaccaaccggaatgatttccaacctagctgtggttagagaacgtgacaattccaacgaaggttttaaaaattggactttcatgtctgttgcacattggggtgaaactggtattggtcaatggaaattaaaagtaaaaactactgtaaaagataataatgtaaaattgaaacattggagattaaaattttttggtgaatccattgatccaacaataaccaaaccatacgattattatgatgatatatacgcggaaaaggaggctaagttgactccgatatctgatattaccaacccaatatcgtcaggggcaccattaccttcctcaacaacggttgtaacttcatctacaagtatgactactactagtagtgtaatatcccctacttttactactgtatcgaatcctgatgatgatccttcaacgccaaataaaataccatcaccaagagaagcgttccattattttattacaatatttactatagggtcaatcttgataattttatattttgttgtattctttaaatcaagaagaagaatcagaagatccagagcggaaaattacgaatttgatattattgataccgactctgattacgattcaacattagatagtcacgtttctaataataatgaaatgtctgttgatggtggtatagcagattatgattttgatatttcggatgaagataattatgcgaataacaatcatattttgactgacttagacttgaatcaacagtcaaatacagcagatgataatgcatgtgattcaagagccaatgaccatatcaatagtatatcaaataatgcgtctgagcaggatgcatcggaagaaaatccatttttatcaccctctgaggtgaatcaagcaaacatttcattcattaatgatgttggtcataacaacgactctgatatggattcctcacattccaaaacgaactttattcaatagaccttaaaagactatacacacacatatatatatatatatagaatgataaattactttatatatttatttattcaatacgatagatgcatttaactttatttatattattactatcttctccctattttctgccttggataaccttcgtttccaatacttcttttctaaacaatcttatcatattgaacacacacacaaatctgttcacgttcagacctgtgtatataaatatttaaatatatgaaaatataaatatatatatatattctttccttgatacttgtacctttaatacatttgatttgtttggtttagtttattgtgaggatctattataaatatatatattttgtattaagtaaaacaaaacactatttttaaatgtattgtccaaacttcttgtgttcttattgtattcagttaatatattaataaaacatttacaaaagaaatgcatatgacaataacaaacaaaccaacaagcaaacttcaaccttcaagtgcatgcaaataggcctattatgcatcataatacaatgcatgatgacagcactcattcttctgtctaggcaaggaaaataataaaacacattatcatccatagtttcattctacaatagtttattgtattatattatgttagctatattttttaaaaaataaattaggggattacacaattattattcatgttgtttctttttcaacttacgagcctcaaagaaagaaatgacttttttaataaacaatcacatttagaatcaaatttataagtaattcctttcgatgagaagattcataactgattatcatcatttctctaatgaaataaaatagtaagataagaaagaaagaacaacacaaaaaagaagaagaagaagaagaagaagaatacgccttaacaggatgaaattgcaaaaagtgcacgagtggaatatccattgggttataattttttgttatctttttagtttaactttgtccatggaaatgggatctcataaaataaatagcaacgataatcatgaacatgaccacatgatttttaccaggccagatattcagaaacctgcatcaagaactatccattggctatttacattatttttcatctttttaatcaattctattaatacttgccttgcttttgctagttgcttaaattggtctcttttattacaaattatatctacaatttatagtctatttgacattacgtttttaaattttaaagataataataatgttgaaaatagaacttctaaaggaactggtatctttatttttttcacatcaataattactctaattattggtttcatatgtttcattaaaaataaacaaaacaaagaaagggtctcaatatctttctctcagccttttctcaacagattaaatattctctattgtagtctggtttttatcaatacattaaccggatttattaaagtatgtttagcaccaatttcgctttttggattctgtaaaaatgataaaactggccaatgtttagcacatggaataatgggttcaagtttcattctctatggtttcatatactccatggtactaataattccctggatgaagaaacaaacctcgtctaaatattgtcaagattatattgacagttggattatatgtatctacggaatagtaaatacttttaccgaacacagatggggaagggaaccatggcatatacatgattaccaacatactgccatggggatcctttggtggaccggggggatccttggtatactgttgtctagaaaggggaaaagaacttttgttcctgggttgattatcatgttcacaggatggtcaatgacacagcatcaccaacatttagaaatcagtaccaatgttcataatatgtttggattgattttaattttaggtggtgccgttagaataattgaaatatccattctgcttaaagataaaccgttggtagatgaaattttatcatttcaatatttatcgccattttgtttagtttgtgctggttgtcttttcatggctgcaaaccaggaacaattagatttagtgctaagattaggagcagagcacagtgcctatataatgattataatatcaggtgcttttttactatattgttggatgctgttctgtttagaatattatgtttatttatatttaaatacacataacaaatctgtcagaaaatatgataggatggatcatgattcatctgatgtagaatctctatttgaactgtccaatatgtgaatagactattaacaaaacataaaaaaaacatctctaaaataataacccaacacaatgaaatttccttatttaaaataatattaacgattttattaatagttagctattcaaccatcatttctttgataaattttttgtgataacaattatatattctttctcaatcatagtagtaacaaactatttaattgttcttctttttgtattttttttttttatctttttagtaagttattgattatcctaatattgtatatgaataaatcatctgtacccattgatttgtatacgtttccgaatattttttgaagtctgcctatattgaattatctcacattatgatgatgaggccagatagaaatataaaaatctttttgattatattgcaacaaaaaaaaaaataaaataaaaaatacaaaaaaaaaaattcaaaatcagagaaaaagaaaaagagaaacaatagctattgaggtaacgacatgacacagtagttgtaacccagattctcaaataaatatatgcccaagtatatttggaatatacaatattgtctatatctattttcatttcgtatttgttttgattaaatattattaatatagtggtaaggattcaatccttgaaattcccttaaagtgccaactaatacagcatcctcagcatcaacaggctcttcttcttcttcttattttttattttacttataattatttataaagtagcacattcaaataatgattccaaatatttctagtaaaagagtgtcctggtctaaaaatgggataattgcatatgcagattcagaatcttcggagggaaatctgtgtattagttttttggaaacaattaatggtgtaaactggagattccatcctccacaacgttacatgattcacccccaattacatgaagactctagtaatatatcactatcaaccacttccaaaaataacgatacaaatactgttcattctactaacactagtaacattgataacactgggaataaccagtatattaataacaaaaataccccaacaacgacaacttccaccagtattgttaacaattatgttaatctaaatggaaagcctggtgcaggtattcctaactcacctaaatttttttacaatatttcttctgttcattggaataattggttcagtttacctggtgatatgttagcagtttgcgatgaaattggtaacatgacaatgttgattgctggccagagtcctgaaggggctactacatttgaaaaattaacaatgctatttcaagataacatttataaactttataaccatatcatgcctttagctcctataactactcaatcgaaacagatagaaaaaaagaaaacaaaaaaggagtatcatacaacaatcttagattttcattggattagttcatcaaaaagtgtcataatttcccagttttgtgccttagacactacaactaacatatatagaaataaagctcaacaaatcccaccgtatggtgtttttcatcctccatcaatgaaatatgcatgtgcggctatacgcagaaatggccaaatcgatttttggtatcaattttccaattctaaagatcataaaaaagttaccttgcaactttctatgtctaattctcaacaaaggagcaaagaattggattggttacaatttgctaatattactccaatagatgatggacattgcatgcttattacagcatattcgaaattgagagaaaaattatgtttttataaattatacgtgtcatggaacggatccgccaatagaccgttatctgatccaaatttaagaattcaaaatatattaaatgtatcccttgatagagttgatagtaaaggaagtataataacactatctaatttacatgtagtaacaaaaacagtatcagaaaaggatcattatccagagattatattagtttttgatattaatggaacaaaaaaatcattaataaaaagaatgcgtttgattaatacatatttagctctggattatttatctattctaaatccaaatttacaaaatgaaaatacagacaagcttcctgtaaagaccaaacattataatgttcgttattataatgatatgataatagatgataaaattatcaatgtatcttcagaaatgttggacagttttatatctttctatacagaaacagggaatattgcttcatataatttaaacgattgggaattagaaactgaacgaatgaagcatcaagtaaaacagggaaaatacactaatataattacttctgtgttaagtgccggatttcattaccctaaatttcctgtttatttatcattagattggatctgtgtttcaccaacaatatcgggtgtgatatataaattacgtcacgagagtattcctgaatttcactgtgtgataaaagatgatatatcaaatgcaaataatgattcaattgatgccactgcaatggctttcacttttgttggaagtacacacagacagttatctgcagaagatttatctattgcatgtaaaaatcatataacaaagttagagcaaataaaggaagaaagagcaataaattttataacgactttaatgactagtctatatccattttttaatgtatccttaaatgctccaaaagaaattatggaaaaaatggtaacaagtagaccaattcaaaagattatgttatttcaattagagttgggtagcagatttagatataaggaaaatatcgcctcaatggcaagaattatattatatctcaaaaatgtcttattttcctttagcggcgtagctcgtaacctacaatttgctatcgaacaaatgaattcagctcaagcagagggaaatcaaaataaattgtttcaaactgcattttcaaagcaagatttaattcattccctgattcctgttgctaaatggtttgtgaagttcataacttatttaatgcaagaagtgttaatattagttaataaccctcctgcagaaaaaggtacattagttcttggtgtacttggatctaaaatgtcaaggcaactacttttgtctattttgactgaagttaaacgaattgcacaagttattacgaaatttccagaatctacataccctgtgttgaatgagtcttccaattatttgaaaatggtattaggtgaatcaccaattaattttgaaaaatttgaaacatttttgatcaatattaacaataaattttctacaacaaatgagggacaaaatgcaaacgagattcaatcaatattaaatagagaacattctttattgattaaagcagaggtcccgcaaagtcatcaaaaagtggcagaatttttagtcacctatgccaataacacattggtgtctcatttgaacgcagctaatgtttattttgctgatacttcaggattacgaacatctcaagaagaattttttgtagaagatgtaagacatctcttacaaccagttgaggatgggttgattatcagttcaaaagcatttaataagaaatatgatacctccaaactattcagtcaattgatatatgatggtgtaacgtatgatagattaagtgagatagagttgaaagatggtaaattgaaaaggtgtagccgctgtggttgtgttacaagggcggggtatgtagttgcatctgataagactatcatctctacttctattcaaacgaagagatggcctactatgtatacccgaatgtgtatatgttctggtttgttatacgaattatgagaaaaaagtcaaatactaatctgaaatatatatatatatatatatatatatatatatacatgtgtgtatgtataaagggaaagagaaagagattaggcttagaattaataatctatttgttgtacacatgttttattctatttttttaaaaatgagaaggaagattgtttaatacattctaatacaaggaagtctttatcctactaatttgaatgatattttagttgtattggaaagtttgattccagtatattattttatttatttatttattttcttgtaagtacatctgtttaatttgttcattttatttttagcttttccttttcgcgtttttcttttctgcccgagcatcagatcaaaattctttttagtgaagagcttttacgcgtcgcggtttcttgatctccatttcgaatggatagccatttattctttgatcttaaaatgtcacctttcgagaattggattaaagacaaaaaaaatgttgccgctttggctagtccactactgatgtaacattacagtcaatagcagagaagataaaaaaaatactaatgttaagctagctttattgaaattactttagagataacattttgctgaataactttcttttttaaaaaaattcaagaaaggactattctctattttaacaaataaacaatatattcaattaataatttatgagcattcaataatccatacaatattataagcctatatttattattttgttgaatacgttatcattgagactgcaagataacagaaaaaagctaatattaatccacatatattacaataaagataataatgatgcatactactatctctactacagataaggtagaccttaatagtcgaaaaaatcatcaaagtaacaatattgatacatcgcaattgttaaattcatcctttttctactctgagtctgttaatgttcttgatcattcacgtagcttcagaaattctttgatattaagagaaatgtctgattttaatataaatgaatctttgaagcaaccttctagtaaatcttttgaggatggtgctactactaatttaactactccaacatcaataaattctataaataataaatctaatgttcaaaaatcaaaatcatctttaagcaacacacagatgactgcaaataattttaagatgagaaagaatgagattaaaacagctaacataacggcatccccatcacttagtgcattggctgatcttttaaatgaaaaatctaaaaatgctgacagaagaatgaaaaactcattagcaaattattcttctatatcagaagaactagaagaagaaaaccacgaaacaaacatgcaaaataataacaatgaaacacttaatagtaacaatcttggatattcccaagcaaatcaaaatttttcgcccaatttaattgatttgaatgacgaacagcccttaaagagcaatgtatttattccaaatataaattcaactaacagagaccatttatcaattgaacaaccagactttttgacaactccagttatagaacaaaaaccaaataatatgttagataataacagtaataaaagtataattgaaactaattcagtagcatatcaagattcaaaatattcatctgaagaaaataattcacaaagcacaaattatagtaacgaatcacacacacacgacacaaatgaatcattagatgaattagtagaagatgataatagtactttgattgatgaatcaggtattatgcctcaaaataacgtaaatccaaattggagtagagtattagcccatcataaaaatagcaattttagaacaaataatatcacttcgaaaaatagtaccttattagatgctggaaaatctctatcttctacacaaactaccaaggacaattctggtaaaccagctaggaaaaaacctattatcaaatctaaacctataaatcaaataaaaactgatgataaacaggaaaagcaaaagaaaagaagaagcatattctcgttttttcaaaagaaaccatcgaaatctaaaagtagtccacaaaatatgataagaagtgtatccttacaaaatgaatacggtacattgggaaagaaacaaacctcttcaagaaggattgtgacaacgacctcaccaatactaggaaaagaggttgaatccactaataatatatctgacacatatatcaaaaacaaaaacaaaagcatcagtgaaagcatatctactcaaagtccaatttatgacaataaagacgataattcggacatggaaagtaaacagagtaatatagaaaagttacaagaaccaatatcattacctaaacagagaaaattacaagaggaatcaattgtaaaggaaaatttaagaagtatcacacctttagatgttaaaaatgctttaaacaaaggagatatgataacagattcttcatcatcagaagatatatttgctaataaaagcttggtaaatgaactgcagccaccaaaacttttatcaccatctatttctgatcatgtatcaaggagggactccggggaagttcatttccctaaatctcttgataaggaagagattgactatatcacacaattagagagaaatagatcgattagatcaagcacaaaaagaagatcaatagacactttatctataaaggcacaaaatgaaggtatgacaatatatgaaccttctgatgtggttttggccactcctgatttaagtaaaagtccgacaagcagtattttaaagaatattggaacttttgatagtgatggattgaattatgaactttctttgggttctattgaagaaaaattaaacgaattgagcttggcatttgatgaagaaccggaagaaatgttaaatttgaacaatcaaaacacactttttgtgacatccgatcaaaataaagaatctttgaaaaatcacaatgaatatagtgctacgatggatgaaaaagaagacgatgatttaatgaatgatattatggagtttgctaatataattaactttggtgatggtttaaaccttgatttagatctaaatattaataatgattctctaaatgcatctaataatcagaaaaaaacatttaaccctaaggttataaaaagagaaaattcacctgaaaaagccaatattaatagtggtgatatagattttaataataatattacttttcaaaattcaggattgggtttacaatttagcaatggagacattgccgttaacaacagtgcttatgataatgataacattgaaatacaatatggcacatctatcctagaaacaccagagattgtagaaacagaggattttaataacgaaacctttagtgcgattgatttcaagaataaaataaaacaaaatatgaattcaaatcatgctactataacgtcaccacatatggaggaatacatagctcataattactctactatagagagacctatatctatgtcttttaaaggtttgttgggaaatacaatgggtaattctttgtcttcacttaatacagatataccgaattctaatggaaaagtgaagttttcttcaaagattatcttatatgaaacctatgatgagtttgaatatgatagacatccaaatattagtacttgtaaccaattgactccacaattagctcaaatgataaaagcagaattaaatgaattgaaaagagaaatggaggtacatgaaaattcaagatgttatacacaatttttttaattatatatggatagttacatttaggcatatataaatcatataagcaattttaattgaactatttgtaaatatatctataaatacaatttcaggtgacatttaattagcatttatttattgtgtatgcctgtgtctttatgatgtcgctaattcatatatctttgaagaaaaaaattggcaacttcacaaaacaaaaaaatttttgtcatttatcatgaaaaattttacttaaacaaagagattgaggaagaagacaataaaagagacacataaataagaactaaatgtgccgccaagtgcatcaatattataatataaaaggatttatattcagcaatttaaatatattaataaaatttgataagtgaaggagggtacaaaaacgtcaaaaaaaaaattattaaaaagtataatttattcaaatgtcggaactaaattttgaattaccaagtcgagtcattcctggccagttattgtgtcctctttatgtaccaacagagccaaaagttactaaatatatagcaggaccaggaaccaaagttgttcactacgacttgaataatatagatgtcattactagtacaagaattggtaatgttcaagttgtagaaaaagacctacctaataatgaagagaatgaaaagacaactaataatgatatgatgctaatagaaatcagtgtaataaataaaactactagtaacgatagtggcatctctaatacacttagtaaaagcaatagagataaattgctgccaaaagaaggtgatattgttttatgtcgtgtcgtaagaatatcattacaaagagccaatgtggaaataattggatttcaaaacgaacctattcctattgatggtggtgtaggaaccaatggacatggtgttataggagtaaatggtgggtctggtggagctacattttcaatgtcacaaagctcatctgatcttggtgaaacctttagaggtataattaggtcacaggatgttagagcaactgaaagagatcgtgttaagatgattgaatgtttcaaacccggtgatatagtgaaagcgcaaatattatctttaggtgatggtgtgaattattatttgacgactgcaagaaatgatcttggagttatatttgctaaatcaaataatggtgcagggaatctaatgtatgccatggattggcaaacgatggtgtctcctgtaacaggtgtcattgagaaacgtaaatgtgcaaaacctttttgaatgaaaaataaatatcattaaaaattatatatatatatatatatatatatatatatatttgtatatgcatcaataaaacaaataaacaaataacatagaagggtaaaaaaaaacaaaatatctatcaaaaaatcaaaaaaaggactatacttgattaagtatcatttacttttaatggtggatactttaattcctcatggttacctctaagatcgtattcacttaaacctataactgcaccaaacttattaaatctttccatataatgtgctctttttaacttagacatttctactaatttaggccagtaaatttcatgatcatatttaaaatctaacacaccaccatagacacaatccaactgtctttcatcgacgtatctattaaatggttcatcaaatactaatttattccttgttactggatcaataaatggatggattaactttaagaaagaccatgctagccatggtatattagtcaataaggccttccctaatctttctggataatgtgtctgtaagatatgcaatacttctttaccgataccaattggaggtattttactgtttccacttatttttggtacatcagggtattctttaaaatcaattaataatgccaaagatccttgtcccataggcatgaaatcaatgactctttccaacataaacactaaatgttgtacttgtctctgagaagtctttgtgttctgtctaccaggtttcaaataaaggattggtctaccatcattgtcgtaacccattacgatttgcttcccactttcattttcgatggctaccagatctgaggtaacagtgtcaccattttcttcaccaaggtggttaataccaaactcacgcctccatgctaaggattgcgtgatacgatcaatagattgatcaatattccaattagtagcttttaagtatcttatgatacattcttttgtcagccatgctttttcttcaagtagaagaggcgatctgtccttttgatctcgagacttaaatgacttctcactatttggaattaataaagcatcatttgttagatattttagcataaggatgtacttctccttttcttcgttattactaaactccgatgtacatctaatttctaaatatgaaggaagatcgaatattggttcatttattactaatatttttttttgtttatccttgttgtttttagtttgagaatctacagtctttttattattgttattgcttgtacctaatagtttaccaaacattgttaaaagtttattttataataaaaggcaatttgttgagttgagatgtgtatataaatgtataagcagtattgtgaaaattattcaattaattaaattggttattattattattattattattattgttgttgttgttgccatatgtcttctagtaagttgaataataaaaacaaagaaagaagaccaagcaagtaagaagaaatagtggttaggtaagtaaacaagtctacatatatatatgaatgtctgtatgtatgtgtatataagaaagaaatataatggacgggagggagatgtttgtggaaggatttaggttacggagaaaagcttaaatacgaacaattgttgattattaagaatatctgactcacattaaatacgtagccatgtgtataaaggcatacatatgcatatataatgttatcttaaatacgatttatgacgctgcgattactaagatgaagtaatgagcaaaacgatacgataccaccgctgctattttctttcctgaacagaccgatagaaaaacagagccatataacaataagatgccttgtgaagagatttgcagtgctcgagaagggctaaacgcgtggatttctgctcgaggagtaatcattctgaaaaaaaaaaaatggccgaattcttcctccaccccttctaaaagatttaggaacaaaaaattacaaactaaaaaaaaaaaaggaaaacaaaacgataaagaagcatgtgtaacaccgatacaagtagggttaagttaaaaataatattctcttcctttttttccaaggatcatatcaatttgaaagttagggtttttgtaaaaaacattttggaatatatccatttatgtgtgatttccatacataatcaatatttaaattgaataaatgatagtaagataacttgatgattaataaccacatagtatatactttatacttagtgactttgtatgcttgttttttctcttaccttaaagtctaatggtttgattaacaaaaagcaatctgtaaataaacacaaaagaaattagttggtgataaaatatcccattgtctatctctgtatattcaatactcggtctgggataaactatttacagattacatagtttttctctcaaactaacattgttagggttcagttacaaagcagttggataaatataacaagagagtagggctataataaatgtttaaaaatcagttatttcttttagaggtgcaatttttttttcttttgacaagactttatgcgtaaaaaattttggcaatataaaatctccaactccatttgacgtcctccacgattttgatgctctgtttgtttgtggcagctcttcgtgacaaacaaaagaaaacacaaaagatacaaaatccctcgcagactccagaaaaaaaaataaaatagaataaaataaaataaaatgaaaaaattcttttttccagctgcctcatcttgtttttttgtgtaggataaatctataaaattcattgtatgggcactaatataaagtttccgtggaaccaacacacagaatcggatcagtttacaatagaatagtatccgtggaaagaaacacacgggaatgtccttttttattattattattgttgttgttgttattttcgttattatggttatttaacggaaatagataagaaaaaaaaaataataataatatttcatacattcgttacattatattagattatatcattatctacgtaaatgataaaatattcatgccttcgttatattattaagtatggaccatagacaatgtttgctcaatggatcgttatgcaatttcattttttcttttgtaagtaagtttttagagaataaatcttttttttcttattactgtgttcattatttggtctagcattcccattgtcatcgtgtctgttaatagtagatgtatcagtcttataggtcttctttggacttactccaggttcaccattattcttgttactatttttgccatcatcttttaacctgttcaacattaaatttgtctttaaagtgtcgcaaaggggcaattgcatatttgggtgtacggatgatataaaaatgtttgactgttttctcttagtacctgtaataatagtcaaattattgttttcaattacattgttattactcgtgatggtactattattactctcaccattggtcgtcgttgtatttttatcatgagatatatttaatataggtgttggtttagctggtgatgatgatatttgtctagacaaaggccttttcttctttaaaaatatgttttgttctaaactatttctttgtttgcgtattggcgtatgaatcttactagcagaaaaagagttatttaaatgtatagtagcagccatattactagtatttgaattactaacacttgctatcattgaatcacttttgttacctgtttgtcgttttgctatatcatcttcatttatattattaatcaatgagcctctagaaattgttctaaataacctcgaatctattcgcttacctgccatcccaccaaacgctactctttctacgggttttctgttttcattcttctgatttgtaccattttgtaaactcattcttttagtaggtgccatatacattctatccatcaactgtctcttcctatatcctctgtttcttctagctgtattatcaatataaaattgttcaccaactatcactgcagattttttctctctttcttcctttattctttgcatttgaagccgtaggttttccgttatctttgcttcttttaattttatatcttcttgatattgtaaatataacattctataaggtactttatatttcttggtagtcatgtcctttttaatcgtatcagatattctgttctttaatataatttttattaaaaaatcattttcattttcattttcattaccatgactatctttattaattttattaattttattagctctattatcataatatatacttttaattgcatctttatagtattttacaatagtatctttattgttaacgtatttttcatgtacattagttgggaagtctgctcgtaaaaaatctaaccaaagttcatcgtcatcaaatatccattcaagattgaatctctcgtatctcattaattgaatcgcattaatgttaatccttttcaaatatttatttatcagtcgatatggtatattcgctattatctggaacttatctttgtttcgaattaaagattgcaaacaaagttcacttaatgttatatctttaaccttcattatgtcatattattaaccgctattattaactgctgttgatccttatttcttttgttttttttttcttttcttcgtttggttttactttatttgatttatttcttattctattttatataagtgatttcttcatagtaatattaacgctctcccttgttacttgctttattgtagtttattactagatattgtgaaatgtatataaatgcgtattttcatattattgtatgaaatatttttaatcctttaaaaacaaaaataaaaaacaaaagaaaaggaaagaaaggaaagtaaagaaaacataatatttcaaaatttaatgaacaagaattaaagctgacaaaatcagtatttgcctctcaatcaatacagtatctatacaaagtaacttactgtaacgtaactaaacaaacaaacaaataatatatatatatatatatatatatatatatatatgtttattataagattgtttctattaaaatttattttttattttttatatgtttttttttaccttttgctaaatataatattctatatgcttgtctatcacaattttctccagacatatatatatatatatatattaatttatttgttcctatcgccttatttatttttgttttttcttattcttcttctttgtagacttttttaccttatttggggaagcagcatgatccttttctttaacatggttaaaaagttggttcttacttccaaaagtttgaccacatgtggcacaggtttctaacttccactgcggtatatgaccctttacaacattatcaacattattcaaatcatcagtgttcatcatactattattctcattatttgatttttttttattctttcctttccccttttgttttttctttttttttttgttattcttatttatacaccaatcttcatcgctactatcattgtcttgattttcgtcaccaaatttaattccactatctttgcaattacgttcttctaatgattttaggattttggttagttcatctatctcttcttctgattcgaatacatcttcgttttcaaaaccagaatcttctatatgtgttgaattagattcattagaatacattgatttttcctcaccataatgcttcttaacttcctctgcaaactcagtaaccaccaattcctcctccttcttttcttcttcatcagcatcttcactgttgtaatcatcagagaaatcagcttcagctaattggcgttcaatttcagccaattgttcattcagttgtttcatattcatgttttgtatatcttgagatatgctcgtagatatatttatggatgcttcttcttcttggttttcctttgcggaatcatactcctctaactctgataaattatccaagcctaatgacatattttcattagaaacctctttttgcaaacggtaaacatttttacgatgtaatttagtattaatatgattgtccaattgtttttctgacttaaatgtcttattacatatattacattcatatatcaatatagtatcagtgtcattgtcatcaatatctccatattgagtatcatttttatttctatcactctttttccaagcatttaatttatttgttgtttttgcttccttagaagatttataatagtctttttgttcatcatatgttttagccaattcatcccagttgacatcttcgttggtttgccaattttgcacttcgaactcagatttttgagatatatctcttttttgttgttgtatttgtttctttaacatgtctctttgttgtttttctttcaattttctttcttcttcctccttagctgcacctctctgcattcttttgtctaatttctttataaatgtgacaaatcgtttaactgttttaatatattcatttttagcattatttcttgccctatcattacgtttcttaatttccctctttgtgcgtctatcgtattgtgatgaatacatgtattcatctttccaactaaaattcttaaaagtattaaaattggaccattttctatagaattgtttcaagtattgataatctgttcttgaatgaccaaaagttggaaacatatatctatcatcacttaatctatcttcaacagcatttaaataacccacagattggatctctttttcaaatatatcatccttatattgattattggactcatttgtactgattcgtctccaccaattaacttcatccattgccaatttggcgaatattttgcctacaatttgatacatcccagcagggctattgtccaatttagtgtacaaggaaccattaaaaaacatcagcaattcatctgtagtgactcccgttatacttgagtcaaattcatattgatcattatcgacatcatcgatgttcatcgaatcatttagaatctgttctctatgatcatcataccacgctctttcttgtggatcacttagtacttcatatgcggtcctgatattggaaaatatttcagtggcttcttctatattgtctgggtttttatctggatgatactgaagtgcttttttgtgatatgctttttttaaatcaatatccgtagcatctcttgatacacctagcaattcataataacacactttcatattggagagtacacaaaagctatatatattcgtgtatataatggtaataatgataataatttaacatactttttgaatatatatccataaacactgtattgtatacatatcatatttaatcaatagctgctatattcaaattgacattttattcctttaggttctttatttttagtattttttttttgagattcgatatttttgtgaaaagaaaagaagttaaagaaaaaaaaatgcaattttttcgttttaggaaatgctcgagaaaattgccctttttggatggacattggtgattacaatagaaataaggctttccttgcattaggattttggtagctgtgcttttatgcgattttatttttgaatgttggcaatttaaataagtaattgagcaatatatatggatgtatatatatatacatccatactggcgttcgattactcttcgtatccactttcatgatcgaatctctctatgacaatctcttctagtttatgcagtattctttcaagagattttttgcttttgtctttgtcccctgtttgtagataagtatcgatacatttttctacttgtttatggaaatctaagctgacatccaaaaattcttctgatagccatacagtgaattttaataaaagactaaataatcccaataatactgttatccttggtaaattgacttctaaagaatctattgataaaccaagttcaatagatgttcttttaatcagattttgtaattggactatattatacttgtccaacagatccaattttaatgaattatatttctcagatgtcactattggacgttttagattgttaaaagtcaatttttcagttgaatttccctttatattctccaattcaaattccaatttttgtgattttaattgttctgtcgacatctctttgcgcaaagtctctaattcattaaataattgtttatactcatcaaacttctcaactaccttattttcattcacaatattcaaattttcaatgttttttaataaatctcgtgatatagaattaaaattttcttgcaacactatctcaacgtcctgagttatcttttcattcatattcctcaaattttcgttctcctttttaagaacgtcaatattcttggaataatctgtagttaaaaatcctatcacattcggaattttttctcttaatggttttacaattgaaatagacggttctttttcatcagatagttgattcttaatcattcttccaataggtatattaaataagtctaaatcatctaatctcttttcatttatctcatatttgtcaattatttgcttggttctttgtaattcagattctaatttctcgatttgttctttttgtgatacagaaatttgtcttaaatcatttaattcttcatcttttttactgacctgttcagtcaaattcttaattctcgtcgtatcttctatatggattaacaacagttttttgacttcatcattatcttgattacgttgtttcaaatagacttttgctatgcctgaatcaatagtttcatcatttgtcatatcatggaaatttggattatgagaatatctgttaaaatggtgtttattgttattgtcattgcgattgtcaagattgtttagattctgtagatcattgttatgattactattactattgaaataattcattctattgggttctcttaaacttggcccattggaattatatgaaggagagtattgattttcattattgttttttatatcactattaatccttgattgtttaggtaaaaaatgatcattttctttatttgaattataattataattatcagacaagttggaagaagatctttctctgtccctgatttgagcttctaataaaacagaattcttttcctgactcgttgaactcatttttattataaattattatataagtaacggacaaaaatatagggatgacgaagaaagtagagtaattggtattatttaatttataattatgccagtcaaattctagataattgtttaagatagtcaatcaacttagtcagtgacacttaatatatgagtgtgttataaaatactttcttcaattagaaacaaaataatgatatgatacaaaaagtatttatatcaaataaagattacaaaaaaaaagtaagtagttttttttttttctaaaagatttttgattcttttttccaattaaattctcctccatctcaacataaaaaagaaagtagcagtaaaaatacaaattaacctgaaaacaaagaattgtactatatattagtacatatatatatgtatatatatatatatatatatatatatatatatatgtgtgtgtgtatttaatggaatctattagtatgtcttcttctgcctttatgatgaaggtgagatttgagagattcatcacttttgatatttgagcctccagactctttgatacgatgacccaaacccgtcttactcttctttaccactgctagcactggttcactgatacctttattaccatgagcaccaagaccttcaccgctggtccaaccaaacttttctaataatcgcctacctatattatctttaccaatttctggagcatcttcaccaacaatttccccttctttgacatggaacttcgtctttgtgatattgaatcgttccctaataactctatcactggcatgaattctatttatccgagggacatcagccctcataaatataggtctttgtttcaataattgagagattaaattataatttggtgttccccatcttgtttttttggtcttttgaattatgatatgttgcttactgcctctaccagattttttggttttcatattgtaatggttagcaaatttagttattgttttgttaccatgcggatccaaaggtggaaaactcatgctatcacttgaataacttaaaaataattcaaattcatctttaatattttggacatgtaatccaaagggatattttttaaataaatcttttgaattcttattttcttccgatataaaatcctctttagttcttcttttttttgctttttgtaaagtcctttcatgtaatttatcttgtaacatcactacagtttctccatctaattggagatcttcattaactagaaatcttttctttttaccttttccaatggtctgcaatgcatgggtttcaaattcttggtttcttgtatcattatattttaaagtgtaggatataaggtcgtctaatccctccttcatatcatcagaaataccatttcgatcgctttcgtcgtcactatcactattattgtcgttgccttcttcttcttcttcattatcaaacgacaaatctgaatattcaggttccggaattttttcctttggtattaacgaatctttgatatattttaaataactatttaatctatgctccggtaaatgtagatcattcagaagaaaatcaatgaataattcttggtcaagccatcttgaatcataatcaccaaacagtttgtatgattctacatagtaagagttttcatggagacctaatctaatattagaaacgcgtacctcagaagtgttaattatgtagtcttcttctaagaaaccaaattctgggtcttcttcattatttgattgcgattctgtacttgattgagattcatataattttaatgattcaatatttttcaaaattattttatcagagatgcttgatgattcttcttttgccatgttattcctgttgttattatcaatagtataattatcactatacccttcagctgtaaaaaaatcctttgttagttcctttatatcatcaaaattttgacctttatttatttcattttgtaaaatcactgatgacatttcattataatttttttctataaaagatatggattttgattttggttccactctaacattatcataagcaacacttttattactattatcatatgcactacaattattggattctacaacagttaattctacctttccaattactaaagatggattgaattctaattttcttttatggttggtaaattgatcacgattatttagttttttgatatcatgacgatcattttctgaaaatactgtttttacagaagtctctgtatcaactggactaccaatttcatctacaaaaaataaatctttgacacttattatttctgaagagtaagtggttaaagaagaatcggatgcattatttgaattaagcacatctgtttcattattgtgtttttctattgaaacatttatatctctatctaaagatgtatctaaaatattaactgtaatgttatctccattattatcatgagtattttcctttttattattattgattacattgatgggccgtatcatagatgagtcattatctagtaatctttcattttctttagatcttagtctttcaattagttcatgagatgggtcataaggttctttagctttaacaaacaccatttttctttttctgtaattacttttattagcgtcttcatttgcattattatcataattatgaaaatttacatcttcatttctgcctaaaagtcgtaatgcagtatactttagagaatgattattttttaaattgtctctaccaaaataataatcttcaactgtctttggcgatacataatttttaccataatttatatctttcatatcttcatgaatatcaatcatgaaatcattgctaccaataggaagggaagagctattccaaatgaaattatcatcctcatcaatatcatgagtgttttggttattatcatttaaagaaaatctagctgtgtactgtttgtggttatggcttttacttttatgactagatttcccatatctgctcgtgttcttggtcttactcttattcttttttgaataatgtttatgtctctttaccataatgcttaatctctttttaattgcgctggttattttatcaaacccttaaatattacagaaagacgatgttagcaataggtaatagagtgtcaatgggctgcgatgattgttttctcttatttaaacaatttttttatttacattcaggtttttacatatttgttttttttcttacttagaagctcttcttctatgttctttttgaattcaaagggtaaagacaagtagaactgcaggaagaatgtagcatgacatacatattatcctataatattcacatttttgtatcagtcatatagatatatttatttggcagtcaaatgtgttactgcgagtacatgtacatataaaaataataaaattacaatacaataaggccaaaagagagagggtaaaaagttttaaatttgctaacagattaataagttatccattcgatttcagatcgagcatatttaatcagtgtactttattcgatcttatattgatttgcttttctttttcaattttggttttaaatcattgagaataatattagaatatgcctcagggtgatctgttcaatttgaaacctacagatgacttttgcataataaaacaaaataaaataaactccaatcagtatgtcatattaggtttaagttatgaatccgatggtggcatcaaatatagtgatggaaggtgtgatgaagaagaaaataaactaaattttaatttactattccagaggttgggtatccctaattggtttccatcatcaagtaaaataattagtaaatcagaattaccgttattgttagatatttattcaatgattaattttacttatagatataaattttctcctataccaagatcaattgatgggccatccccaataaattttcaatccatgtttagagaaaatccgttaaatataatagaaaatatgctaataaacccagattgttttaattcggatattggatggggatgtatgatacgtacaggacaaactcttttagctaatactatacagagaattaaatatggcagaaactttacattatcgattaatgatgatgataggaacagtgacagcgaaaatgacaaatctattattaaattattccaagataaacctgaagcaccattttcgttacataactttgttcaagccggaaaagaactttctaatatgaaaccagggcaatggtttggtccatccgctactgctagaagtatacaaaaattaatatatgattttccacagtgtggtattaataaatgtatagtgtccgtctcttcaggagatatttcaaaggaagaaatagattctatatacgaaatgaatgaagatagtaagattttaattttggcagggattaaattgggtatccattcagttaataagtattattgggaggatatattaaatttgttgtctacaaagtttagtgttggtatagctggtggtaggccatcctcatcactttattttttcggttatgaaagaagttgtgaaaaagaatacaaagatagtcaattactctattttgatcctcataggtctcaaccaagtttaaatgacgaaaatggtgttggtgacattgattataaaacttgtcatagtatctattatgggaaattaaaattgaaggatatggatccatcaatgcttatagggatattattagaaaatttgacagattggattaattggcaaaacgttgctaacaattgtaagatatttaatataatatcgagtacaatgaatgatgttacttggaatgacgatgaaaatattgatattgagagcttacagagtgatggaacagctatagataatgagcaaatggatatttggtataataataatgataatattagtaatgataatattgcaaacaaaaataaaaatattgacattcaatttgaagatactttagaaagaaatcataccataatgttgaaagagaaacatgatgaaaatatggatagtaatattctaaggcaaaacaatacacttagcagtatcacaatggactatgtagatgttggttctttatcatatcatacatcaaaaactctaaatgaagcgtttgaaaatatccagtgcaagaaacaaaaaattatgatttttgaccaagataaatcctttgatagaataaaggatggggatattgaagttgaaaaggttttagtagagtctgactcaatagagccaaccactatattgtaatatcattaaaaataactattagatgagtcatgtcagtatttttgtttgtttgtttgtttttcttatctttttttttgttattcttcttcatcattgttttttttatattctcgagtaaggcaatgttgtaatacctacattgaaataatattctttaattttatatcttatatatacatatttctatatattccaaaattatatttactaattttttgtaaattattttcttgattgccatggtctatgaagatcaattaaatttttattttccttaaatttaatcacagattaaaaaattgtaaggctattccttaactaatgcgggtagaaattatacattctttcattttttaggcgcaagtacattcatatatagaggttgatatatttgcgttatttgaaaggatttctttttaagtatcgaatagactctataaagaacaaattaatatgtaaatctgtatctttttttcttttatttttagtttttttcaaatattcttaaaagaattacttttttgcaatctgtaaaaaagaattattacaaattgtaaatacatacctatatgtttatctgaaagcacattcaatttaaagaactttaaaatatatttaggtctatcatcaaatacagtccatttaacaacctctctcattttttatagtaaggttacaattggtccaatataagtgctattttgcactcattcatattgaactcaaaaatataaaaagatatcgatacacatatatatagttatagaccacagttgctctcacatatccaattacgtaaaataagatataagaatgtccgaagaacctaaacgtaacttcaatttgaaattttgtacagtctgtgcgtctaataataatagatctatggaatctcatagagtgttgaaagaggcaggttatgatgtcagttcatatggaacaggttcggcagttagacttcctggtttgtcaatagataagcctaatgtctattctttcggtactccatataatgatatatataacgatctgttatcacaatcagcagatagatataaagccaatgggttattacagatgttagatcgtaatagaaaattaaagaaagcaccagaaaaatggcaagagaataagggtaagatatttgattttgttttcacttgtgaggaaaggtgtttcgatgcagtttgtgaggatttgatgtttagaggaggccatttgaataaaatcgtacatattataaatatcgatattaaagatgataatgaaaatgcaaagatcggtgcaaaagccatattaaaattggccgacatgttaagtgaaaaaattgaagtatgttctacaccggcatctaatgtatattttgaagatattataaataatatattgactgaatggcaaaaactttatcctaaactaccatgtctttactcgcccgcattttattaagtatataagcatgtaagcgtatatatgaatatacatgaatacatatatatatacatatgtctacaaaatagactcaccggcagcgtatgtttatctcaagagtaagcacaaaagtttcagcagccattcttttattatgtctgtcaagcaagaagagctgatattattataaacagaacattctagaggatacagaatgataaggagtaagtcttccaagtctgggatttcttcttcattcattgaatatcacatcgactgatatgaataattaaatgaatgattaaaaaaaaaattatcatctataataaatatagataataaagataaatgaataaataaatcaaaaattgtaagacctacccgtttctatcaagatcaattaagattttcccccttatattaatataaagacgactgttcttcacgacatcttgtaacgaaaaactgggaatggaaggaaaaactggaaagccaatctaacccccacaccaattccccccaagaaatttttctattcacatcccaacaaactaagattaactcttgacttccatttaaccttctcatgaaagaagaaagatatttcataaaatatgaaacacacctctatcctcatggaatcaatgaaatgtcagttgagaaaaccataatacgcatattagaataaaaaatgaaataaaaaaaataaatcatgaataaacatctctcaaaagatcccaacttccttaacaccgatttgtgatcggtgtcatacttctccaggcagaagataaaaagggttctcaataacattaagccatataaaatgaaacattaaactgcttcaattcatataacaatgttaccgagaacaaggaaacgaaacgtcagcaaacacacctttcgcctacgtatgtgacaaaacaagatctctcaaaagacaaaaatataaaatattcttatttttcgataatgatcttatttgatggccaaggaacttacatcaattgaaagaatcataactgttcgacaatgaaaagaattccaccgaatgaccagaatatgattctaaatgcctagcatccttgtcagaataaacaaataaaccaacctcccaaagtgagaaattgacatatttggaaatcccatgaaagcgcatatttggccatttggacttcttgatctccaatggcgtcttaaggtaagtatggtttccttaaaagaaaaatcaagaggaacaacaagagagaaatgtagaaacacgagaagggaaaaagtgacaaacttcgtaacgggaaaatggaacagctctcagaaagtgccactcaaacgtgtctgagaagttctttgcaagagacgtcgatctgttttccttttatactttgaaaatttttttactcctacatttttgttgagaaaaaaaaaaatacagtttctctattttaataaaaatgtacgaagggggagtttctcggtcgcaatatacgaaaaaaaaaataattaggtctttcgattgttctaatttgtttttattgtacagaaatgatctacataatgtaatgtgtaatcatttactgttgatatttaatgataaatattggtatttatacaatttaataaaattatataactaatataatacttattttactgaaattatattgttctatacgttaattgtttcgattttggctaaacggtaaatgttcgttccaacatttctaatcaagacatgcgatccagtgaaggaatcgttttttttaaaatgacttgatgtaataaaaccattacctctaccatgcccctcagaaagatgatatgtaccggatgtaataaatccaattaaatggaatatttcaggtagagggactgctctattattttcaagtctaccattagacttataaacaccatcagcaacactcttccaaaaagaactatctttttctgggatggcgtatattctagcattatcttttggatgtccttttcttaccataatacatgaaactgccgttacagatagtggtttcttagtaatatcgacacttgtattaaatttttgaatatttaatttatgaatgtttctataatttgtcaattttattgggatagtaggtagtaaagattcaattgatgtgccagttgaattatctgtaacatctttatataattctaaaacatcattgaaattatttattgtccttgaatatgttttatcaccaaattgtgtggtgcgcttctcatcaactaaaggtatctcactatcatatttttgttttaaatactcaacaccattttgtataatttgtaaaaatttccagtcgcagctaaagtaatctcctatttcaccagacatggctggtaaatcagataaatgaaccattggcagcttttcataatttactttctttcctatagtcttcttttcccatttagctcttaaagacgtactcttataagtagaattctctaatgccccaatagtagtaaatggataatcatcagggaaatataactgtttattttcatagcttagttgttgagtttgtcttaaccccatattataaacacgaggaacacgatttaattgataccatatcggtaaatgccaaaaccatggaacaattactagccaatcattctctgtgggccttctaatcaatagtaatggaatggaggggtcctgcccatctttaaatgggattactgttcctaaattatttttatttgtacctttggatttaagcaattccttacgtcttttagataactgttttagagtttgttgattgttataagattcttctctaccttttgatgttgtcaatttagataataccttgctgaattcatcttttaagattgaatcatcctccattgcaattatatcatcaatgtccatactgttctgagattttctactgttgttagttccaatttttttgggtgcagatagatgtctaggatcaataacttccatagcaaacatcactcttgatggtagaacatttgtgtctgatatattacatatttttttaaatatttcaaaattttttgaatgtttgcaacttctaagaatactagatattgcagttaaagatttggcacctctaatagtaatactagctaatgaataccgacaatcttgaaccaatatatttttactatgcattcttgttaggctattgaacataattggataaattgccggatgtagtcttaaaattatttcttcctcatttacccataaaagattacatggacccaaaattgctgattcttttacttctgaatgattgttataaattaaaccttcatacaaatacttattttgataatatttctttaaattacctctatttctagtcaaatttccaatcaaattctttaaaaacatcttatcttcacttatattagtaataaccatagtcccaataaaagatgtgtccatacataatgcaccatcagaagcagcaacattaccacccaatctatgagtaagtttgaaacatttttgggaaggggaccaaggaatattaaatccccatcttttgatcatatgagatcttttggcgttccaaacatgggttggtaaccatgtaaattgacgttgtcttttacaaaattttatacgaccacgaggaattggagccaaagcgtttataccagtgttatcataactaccacatttgttatttaatctaccattgttcatctcagatgaaattggaactttagagttcttagcttccttgatcaatttcttcaaatatttaattctttgtcttatattgtatttcgatgaagtaacattatctggtagggctagcttcatagacatacatttacttgccagacgtaataacttgacagacattcttgcacgatataattgagatgatgataatccatgagttttctttttggtctcattaatatttttatttttaatagttatttgttggtcgttttttaacatttctcttaatgctcgatttctcattcttttaggtatccttctaacattatgagaggcagttctacgacgaagctttctaggtaaagcttggaatactctggtggagtttgcattcttagattttagcatagaatattgtagttgggtcaattcaaattgacgtgaattaataaacctatctatttggatcattccaccatcttcactcaaagatttgtcccgatcatttttcagcttattagacgcgtgtatagcttctgttctaatggttcttgcagttctaattttttgttttctaaataattgatttttattcaactgtttctttccacctaaattatctccaaaattctttgcttcactcatttttaaatatctatccaattatttactagggacttttgcctgtgttggtttttctaataagaaggaagtgataaatgttaataaggtttagttgtaaaatatcatcccatcaactttactttctttttgtattgttccactgatatttttttttcgttactcatgagaaaagaaaagaacaaaatttcataaaaaataagttacatatcaaagaggttcagtcaatgtcattgctcaggacccttttaaccattaaatgttacgggtagcttcctgaatactacttgtaaatcaggaattaccgtggtaaaattaatgaacttactaaatacataaatatacacggttacgcatggttttactgtaatacaagtgtaaaatacttattcgaattagagatccatgagaataaagaagattaaactaaaaaaaattattctctgtattctttttcatcgttttagatattacttgaattgtccatatcatgtgtattcctttcaaataaacaataatcgtagtatgatactccatatactttattccaatacctaccagtgtattgttctcctagcttagcaattaatgtaggtatagtaaataccctgccaaataacttggaattacccacatcaatatattttttgcaatagatgggagtccagttagtcagatcatctggtgaaaatatatctttctctgtgtcagattctaacgatatatccacaaaatattgacattgtttgatatcaattaatttatttggatcaaaaaggttcatattattcattccctcaggtatagtacggatagcatcaaaaacacttgaggtctctgcaaaatcgcctggtaacaatccatcaaacccagattgaacaaaccgtagtctatatgaatcaggtaagaaaaaggagttagggaaatgataccattcacgaccagtacaaacattaactatgtcgtcttcattattggataaatggtataaatgtaaatagacttccaatggggctgtgtaattaaatactagtgcaacgatacgtgaaattgcttgaagaatggtaattgtaaggataagaagttttacagttgtctttaagcatttgttgaaaccaaataacgtggataaagttttatagaatccaatagcacctgttaatgtgattaatccatatataggatataggaatctttcttctttatgtggttgcaaatcaaaaatagtaatccaagttatcaaagaaagagataatggccagatacttttatggaacagtccgaccatggcaaagaaaaggacaggtaatggaaaacttaatgtgaggttaaggaaatagtagtaccatggttcaactccaaagatgtttggtcctgtttccttactagtattcaatacattgtacattaaaatgttccatgacactggcgaaaacttaccatagaaaatggaatcaatgaaaataatgagagaacctaggacagtgaagactaaagtacaatcaaacacagtacgaattgtagatattatattgtgtgtaaaaaggaagtggaaacataatggtaaacttaaaactaaaacaaatggccaacctaacatgcttgcaatgaaagtaaaagttaagctggatataaaacaacctgtagaattagtagaaagatactttattgaatatctaatagaattcaaatacattgtcattgcaatagatgaaggtaataattctacagaagcgtggaaataaccagggctaaatatttggaaaagcatccataaattagcaatttgtaaggataaagtagatgcaatttcattaaaaagtttccattcataaattgtcgatattaagcctagcaatagtctagtcaaataaaaactgtcaactgaggtgataggtaaggatgataatttatttattgggtataaaaataagtagaatggcattaaaaaagcccaagaacgaattgaataaattggggagtattcccatgtttctttcccaaaccctcttaacaataaatttaatgggtcccaataattgaaagtttcgtcacaatccgatattagtgaatatattggttgtaaaaagagacgactaaacagtagtattattaagagaacatatgaaacaattttgcatttttttgacatcgtggaaaagaatgtgtccgaatttaaatagattactatagtcactcaggaatcacacgagcctcttttgttattttattcggacgaacaaaaagataaatttatttgattgtttatgtacaaaaagagtctttgtatattggagattctgcaaaatatgtggatgatcttgatttacacctattatgacacaaatacaatattgtttcatagtatatgtaagattaaaatgtttgtatgagatacatacagatttatttctttttctttttctttttcttaaatttgctatttgatatgattcctgaaaatgattgaaaaattctttctagaaaaatagaaagtttactgctggaaatgaacatcgatgtgaaatgaattgagtaagataaaatataagttgataaaggaataaaaaaagagataaatttacaagaagagagagagaatggactaagatgtaacattattttaattttcttgtgacactaattagattcaagtgaaagtttagcataataagagtatattttatcatactctactatatatgtctgtaagaaactggaaaattgtctggaaagatgcacagatacaaagcgaatactaggaataaactaacagaacaaaagatatcatgtcccatttgtagtaaattagtcccatattctagcattaattctcatttggatttatgttctcaaaggccttcgaataaaagatcccacaacacagtaactgctgatgatggtaaaagctcaatatctagcattttaatgggtccgagtcagaagaaacagagggtgtcatcacaaagtacaattattgatttagatgcagattctgataagggaagaatacaagatgataatgaaaatgcagatgatcgtaaaaaccctgaattagagataaagaagatagcagtagagtcagttgcaaattttagtaagagcagtgatgaagatattaacaacattaaatatttacaaaaaataagtcatctacctttatccgaaaaattgaggcccaaaaccctgttagaatacgttggacaacagcacatcctatctcaaacagatggtaccctatataaatatattgagcaaggtattataccgtccatgatattgtggggacctcctggtgttgggaaaacatcattggccagattactaactaaagcagttactaaacgatattatatgatagagaccagtgcaaccaaggctaatacccaagaactgagaagtatctttgaaaaatcaaaggctgaatttcaattaaccaaaagaaggattatattatttatagatgaaatacatcgtttcaacaagtcacaacaagatttattattgcctcatgtagaaagtggggatataattttgatcggtgcaactacagaaaatccaagttttcaattaaacaatgcattgattagtagatgtcatgtttttgtattagaaaagttaaaggttaatgagactcaaatagttctatctcgtgggattgcattattaaacaaattaaggaaatttatttggaatgtcagcaatccattaaaaatatctagagatggattggattatattgtagatgtttccataggcgatactagacgtgcattgaatttattggagatggttgaagtatctactagaactattgtatcagataacccattagatgcagaatcgattaggaaccttgttaagagcaatagtagtaatgggttcaatacatattatgatccaaaaggggataatcattatgatactatcagtgcatttcataaagcaataagaggtagtgatgaaaatgcagcattgtattatttagggagaatgctgaagggtggtgaagacccgttgtatatctctagaagaatgataagaatagcaagtgaggatattggtattagagataataccatgttaccattggctgtagctacacatgatgcagtaatgaagataggtttacctgaagcagatctggctttggtacagtgttgtgtggctcttgctagagcgcctaaatctgttgaaatatatagagcctggaaacaattaaaaacaatgttggatgaaaataaatattcgatgtcaagcagtgaaattcctatgcacattagaaatgcaccaacaaaattgatggaggaattaggatatcataaaggttataaatataacccagattataaggatggtgtgtgtaaacaggaatattttccacaagaagtgttggacaaatgtgaggacccagaaaaagatttaaaatttttgacaggaaaacattttggcactaaaattgattcagagttgaatatgaaaagtaaatgatattgattttttgttttagagtaaaatgtgcattttaatttagtgaaagtgaatttatagagatataagagtatatattcctatataaaacaaaagaaagtaaaaattttagctgaagtatttttctcttagttatgcaaaggcatgaatgcaaccttcattttatgttattgttgttgtttaattctattttacaatgtagggagatatataatatgggcagtttagtaatgcaataactgcatacttataaaacacgaaggtatattgtagaaaatcttaaatgtgatgatttctgattgacagatatattatatatgaagcagtaaattattaagacagaattgaaaacattattttattacactaatctggattgaattactaaaaatattgaacaaagaggagtgggtaattagataaggaaaatcaacgatgacagacagatgttattaaataaaaaatggctaatattaataaagtatagtatgctggttattattattaataagagtaaataatttcataatctctctttatatgttgtgaataataatggagaaagaaagattgatatttgcagattttaagggattatttcaagtgatatccatatttccggatattcgtaagaaaactgaagaaaatccaggatatatgtaactccactgggcaacaacaaagtattttagttggaaaattttttgggaatagcaaccgtatcaaatcttattcaagaggtctttgatgattaagagatatgccatggaagattatcttatttaaatatattacttaagaccaacaatcaataacaaaaaggtaatattaataaatcagggttattaaatagttttatatagagtctatgtgagaatgtttatatctagatgtattgtttcaatttatccatttatttttaacatttcttttatagattgcttgagataatattttactatatttttttttttgtgccatgtaaataaaatattttgaaattaaataaaaattgacttaaaaaaaagttatattaccaaaacgttaattttcatgattttttaacaattgtacatcgtaatgattatattagtcagatggaaaaagtaacagtttatatttacggtctaataaaactaaatttttaagatatacaattttacacctcttttccaccaatacatgtatattattcttcaatacaaggttaaatcgtcaaataactatttagtataactgttttaatagaacttctaagaacaaacaacaaaataaacaataaaaaataaaaaataaaagaaaaactacgatacattttcttttaagtcaaatgaagaacataaaaattacaaacttccacctattccatatgaacactacatacaactaaataagattaaaaataatagaacataaaaaaaatgtgacaacaagattctttatcatactcaaacataaatataaactttttttgaaacatacaaaataaagtctaattttttgtccatttatgactaaacaaaaaaaaaaactacctcacacttaaataagaaactatcagatgggtcataatattttgtgtcacctcaattgctttaatcattaaaaattagggtctgaaaaaaaaaaaaaaaataaaaaacaaaagaaagaaataaataaaaaaaaaaaagaaataaacaaaaagaaaaagggataaaaattgaaaactccactcgaacaaacaaattcatgcaaataaaataagggacaaaaaattagacattgtgtgctcgtaacaaaggcgtctcaattccattctggttgtatcgaatgtgtgacaataatgcaagcataaagactattgtttttttctgttctcgttttttccatttgtttcttttctttgtttattcgttttccaaaaaaaaaaatataataataaaaaaataaaacaaagcattattattccattagattatgcgattgaaaaatatatctatattatctacaattcttaccagtattgtcacgctatctgttatattatatataatattaatgagaattgacggcataatatcgggtgaacccaaaccaccatcatcacctcgatggttaaaatttcctgttattcaaacaatcgatcaaacaataagagtcactgatcctgatcacaaacttctatttataggagatgtgcatggcaattacgacgaattaattcaattactaaaagaacatcagtattataaagatggacagctgatagcagaccccaataaagttcatattacgttattaggagattttctcacaaagggacccgattctttgaaaatagccgattttattttgaaatataaagatcaaattggttgtgtgttaggcaacaatgagataatggtattattatccttattaaatccgaaccatagattcaaatttccactgaagtttactacagaagacaacttcttgccgaacgaagaatttgattattggaatatcatcacaccaagaaagaagcattataaagtggccaaaaaaattgggttatttaaattaagtgagttggcacaacattgctccattgttaagaggtttgatttgactttaagtaatgaaatcttattcggtgtgcatgcaggattacttccaggcgattttatatcaaatgacgaaattggagataaaggcgagaataacgtttttttggggagaatacctaaaatcatatcattagtggatatgaagtatgttaatgaaaaaaactggaccgaaacaggaagaaacatagacgatgttcaaaatggtataaaatggtacaaggtatggaataaatattaccaagatgattctgaaaacaaacctaatataactgttctatatggacatgatgcacataatggactgacattgagggaacatacaaagggattagattctggatgtgtgaatggaggtcacttatcttctttggaatacagtttccattcaaaacatggccgttatataacccatttacatcaagttccatgtcatagaatatgaaaataacaaaaaaaaaaaattaatgacactgcaagacatttattatctgatactattaatttccacaaatatatgtacacatatttactctttaccaatgcatatgatattttatatattatatatatttgcacatttaaacatttaaacatatatatatataagaaccttacattaattggccaaatcctttttcagattatacacgaccattttgaataatatgcattcaaacatacatggccatcccaaagaaataaaaccattcccatattatctttagctttattttcctcttttttccaacaaatgttttgtggaaaaaaaaagttacaaaaatcagtccctaaggaaaaaataatgtcaaaaattcatcacagcccttctgaatattattatagccctactctcttgttatatttatccaactgctttgtaactgaaccctaacaatattagtttgagagaaaaactatgtaatctgtaaatagtttaatcccagacggagtattgaatatacagagatagacaatgggatattttatcaccaactaatttcttttgtgtttatttacagattgctttttgttaatcaaaccattagactttaaggtaagagaaaaaacaagcatacaaagtcactaagtataaagtatatactatgtggttattaatcatcaagttatcttactatcatttattcaatttaaatattgattatgtatggaaatcacacataaatggatatattccaaaatgtctttcacaaaaaccctaactttcaaattgatatgatccttggaaaaaaacaaaatgttgtttaatacccaaactttccttttacgtcggtcttataaatgtgtctcttttcaagggatgggcggaaggaatcagctgttttttttttccaactttagaaaacaaaactgagaataataaaaaagaaacgagacgaagatatcgtttgtttcttttttctttttttagttttttttttctcgtttttattttcatttgtctttcttgtttctgtttctttatctttcatctttttcacctcttcgccaaacttttcatataaattaactttttgataacacctttacaccttttacatctttacctccatccaactttcaaagggtacaccgacactaattattcatttactgtcacctactactagcaaatatagtcttgtccatatcagagtgctaagtgaagaagcattgaattcaattgtgaaataactgcactaaggaaaaataacaaaagaaaaatacatacaaacaaaatttatccagtcacgacttagatccgagtaacaatatacctttctttctttctttttttctcattttcaaactactttaattaataatagtatttatattttacatattatttatattcttaaaacaacaacaacaacaataataataataataataaataaataaaaaagaaaaagaagaaaaagaaaaaaaaattttaaatgtctgcaccagaggaatttgatactgctaaagaaacatttgattcagttgagcattttgttgatgctttagatgccaatatgcttcataataaggataatgaagataataatagtagtataaatagtaataataacaacaatactaatgctacaaattctatcgctaccacttccgcagataaagcttccacaaataatacttctaacaacaacaacagtaataataatgataatgataaaacggcagataatactaataataccacagattctaccaatagcttagataatgaaaccaatgatcagaataataatattaacaccgaagaaaagatatccaatagtaacgataatagtgttgctaccactaatcctgttgattctcagaccgcatcaaccacaaattcttcctcaaatgaagctataaccgtttccaatattccaaatactacaactgacaccactacttctattaataacacaactttcgctagtattcctaccgacaatacaaaagataccagtaattcaggtagcgtcgattcgaataaaaccaatactatggaaactaaaaattcaggtaagaaattttgggaaggtaagagattctatattaatgatgcacaggacgctcatgacaatatgaatgacgccaaattattggttagattaatctcagataacggtggtgaagtgctaagtaaattaccagacgtaaatgatcctacaatttcaactctagataagaaccttttggtagtatctccatataacgacactaatttagttactgttagcccaacgtatattaaagcatgtgtccaaagtaatactcttttaaattatcaaaattatttggtcccattcgataaaaacagaatttcgaataatgaaaaaaagggagaggatgagcagaatgataaagccaatgatgatgataatgctgagggccaatctgatggatcatttgatactaatgtggctgcaaacaatattttatctaacgataatctgagtacagctgtcgctgttgccaatgctaccattactgccactactgtcaccccccttcatcctactactactgttacaactggaactgacgctcccatgacagattccacaaatacagattctacaccatccaataatgaaaataaaacgaatccatatgacaaagataatacatcatcgactaacaatttcaaacaaaatgaaacttctattaaagtggatgttgaatcagaattatccatggttgatacaagtgatagtaatggaaattctttaaaacatacaccattaccaccaaatttttcatcacataagaatgtttttagtgaagacgaagaccagttcattcttgatgttgttagaaagaatccaacaagaagatccactcatactttatttgaagaaatttctagattcatgcccaaccacaccggaaactcaattcgccatagatatagaggttatctatcgaaaagattggattttgtttatcaagtagacaaaaatggaaaattagttcgcgacgaacgtgggaatttgatcaagacagacgttttaccaccttctttaaagagaaaatttacagcagatgaagattatggtttggccattgccatcaaaaaacaattctaccgtgacgctttccaagtagacccagaatctggttcatctttgatatcacatcaagaaactgctgtagatattgctaaaaggaatatgaccatggatccacatcatgttcccggcaatgaaccatcctttaaagattttagagtctatggtcgccgtggtccagtagctagagaattttttaaaacatatgcagaattggttccaacacataccgagagtgcatggagagatcgttttagaaagtttttacttgtgtttgggattgacgcttatattgattattacgaggaatgcaaaactattggtaaagaacctgaaccattgaaaaacatgacagtaagaaaaaagaagagaggtgacctcacccctggtaattataactcttccttaaaaagagcagtttctgcttctgaagctgtttttgacccaatgaattcaaaaagaagacattatatggaatctactgaacctgaattaatcaaatctgatcaaaatacaggtaatattagtgctactacagttgctggtacaaataatgggaacagtagtatggtcaacactggtgtatctcttgagaacaaaaatatcaattctacaaatcatcatggaggaaaaatgacatctaatgaaccacatgtaaccttagaacaaactccatttgaggtaacacctcgtcataaatcagatagtgcaagttcaatagctgaaaataataaaatcaaaccaactcatagaaaaactactgaagattatgataatgaattattagatgaagaaaccagaaactttatttctagtttaaaagatgatttgaataaaatcaataataacctgccatttgaatacccaccagatattgcagaagccattaggactgattatgcaatggaagaaatgaagtatgataccattgatcctgacacaattcagtggccaccaaagattgcatcaatggatcttttcttaccaaaattcttccaattggaaagcacccgcgaatttatgaaaagagttaacgatgtaatatcaagagattatgagccttcacaagctgaaatgttggttcaaaatttggctgatgaatgcggtattagaagaaatttctgtactgccatgttaacgtcattgagtggtgacctgatggtgatcccaagatatttcctaaacatgttccagacagatactaatccaccatccaatgtccctggtatctggacagcttctgatgatgcaatgttaagaaaaggcggtcctcgtgaattaaaggaattagaaaagaaacacggtagtggtcgtatcgaaatgagaaaaagatttatagagactgccttaatttagttgaaccaaattcaactatcataaggaaatgtaaacataaaaaaagtagcatgctaatgcagttaagtatcttccaaaatatgtaatactacatccttttacacgcattcttcctcctccccgcttttactataattacaattttatatatagatcagtaaagttttataataaatttcttaaaagacgtataaaatatgtcaaacatccaacgacaagcaaaggtagtttataatcgcatatatataattgtcctatactcaccaactctaattcttacccattacaaaatcagatatatacaaaagaatacagaataaagagagtgtctcagacacctctgcacaatatctaggtatattgataaatcagaattaacaccagttggctgtcaatacacacttcaatcacactctctatttttatgcactattcgaaaatcattgtatagctttcttttatgtaagaatttgattgcaataaaaacaaatactgctgatttttcaaataattttttttatatattcaattacaaagagataattgggttatcagactgaacaagaattaagactaatgacaaagaaaaaccgtcatctttgttcaacactcttatctattcaaattattaacaccatcgtaatcttatattcacaataataatcgaaatagaaaaatcaaaatggatataataacatggcctgaagaatcccaaattaaaccaagggatatttctaatcttaagaacgatcccatatacaaatatattaaatccctatgttataaaactggtgtaatttcctctatattatatttgttaactcttggtgctatacggcctgctttgcaaagacactatgaacaaagacaagaatttattttggctgtattattgagacttcggagaacattaaccatcttaatgtcccgtattaaggacaaaaatgttgcacaattcaaattcaataaagacaaaactaaaatggatagaatgattcaaactgatttgccttcctatgatgtttggacgtcacatgatacaatatatggacaacgaacagaagaagaagatgaaaaatctttcattaatcataagttgagacgaattaattattgcatgaatcaacatgctattatcatgagacatttagataccacagaatggtttacatttcaattaaaattgctaacagaccaagttgaagcttctagagagaaaactataaaggatgtatgttctaaaagtgagaacgttacacagtcaattcgtgagattaaaggctggttcgttaatggaagaatatcttaatatattaacaaaaaagtatattattatatatctatctatctatcttatttataaaataatattacaaatgatctaaatttgcagtaacatgtatttacaaagagtcttattaccaatacaattataaattgatattaaaaggaatatgtaatgttaatatcaaaacaaaaatgaaaataaaacaaaaaaaggcaaaatgaagcatgacaatatatgcttgttttcaaactttatttttatgtagcaaataaaatttattcttcgactgagtatattttttattcccttgaggatttttctccttgttatcattctttgtataataatcatgaatagtaccattaggattatattttaaagtaattaccggttgggtatttatattattagtaaaatgggacgttttattttggtgtgtataccgatacatctgtttgattctttctccacgtcgactccaacgagattcaatcctagccaaatcctcttcctttggagtccatttggcctttaatatacgccttacagcctctggagagatcttgaaacgtgaagccaaatcagatgcagtcatagttgggaactgctgctttaacagtcgaacactttccatctcctgtctagataatctctttggagggttccaatgagcaccttggaatttttttttcaatgcatctttttgtatttgccagtccaacttattttgagaaacttgtaaatcaatcaataaatcatttttatttgaaagactagaagcatcaatgaattttaatgctttcttaacattataatttccaataatggtcttttgggcttgttcctttgtgtctagtactgttgttgaaggaaatttagttgaagctttattaatggtatttttgattgaatctaaacctttctgtttgttacagataatattagttctatgaaatcgtctcacaaattcccgtattaattttttgctcatagatactttaggccttttataatgaccatagaatcattaattaacaatatctttgcctgtttttatttatattattcaccagtaatgatgacgtgtatctctgtatttttctctttatatatacgaacttatttactaaacacaatatacagtagtaaaaaaaatattatcattagtctttccagcacccaatgttttgtagtatttgactttcaattatgtaaacgttgctgcttaacttttatcgatttttcaatttcagggattcgtcatcttctcgatttccgctattttaattatttaaaagtcttggctgctgaacaaaaagtgtacaaccatcacaacacttaatatatacttgcaaggtaagataacaaaggtatcttttactgtattttcagttatttatgttaggctagggaagtgaaaagattaactacaatattttgaatatcttttaaacttaatatctatttttaattatatattaccttttaattatattcttatttagtatttgaataaggatctatagtcataaataactaggaaaaaacatactatgaacattatcaaaaaactaatggattcaggcaacagacatgaaatatgtgtgattgcatctggtgaatttgatttattacgctccaaacaatcacccaaagctacttctgaatgtatttacaatgacagcctgttatctattagaactaatggtcaatattcatataatctagtggtcaagaaggttattgatttaacagataatgatgaaggagatgttgaaggtgatggatactattcagatgatgctacaagcgttctgtctgttcaatctaagatcggtggtaagaaggatgatgagtggtgtttctctgttggaccacatttggattttaaaagaacatggtctaacattggtgcaaatatatttacttggaacaatgttttaggtgatgaaaatgatgaaagggttcaatttgtaatttctaatgatgttccaaccagtgatgtagatcaattcttacaagtactttaccgttgttattattctgtagtaaataagaaacctattaattcagccacagagacagatattaaggatattgaacttttatttaatactattttaccaaatgaacatacagacaaaaatactacaaaatgttcatcagatcttctggacaaattaaacaaattatctgttgtaaatgacagtaaaagtagagaagataaagaatttgatcacaattctgattttaattccgattcagataatagtgttaagatagatgtgaacgaaaaatatgaagacgcaagcgatgttattattaatgaaaatagttgttcaaaacagtcaaactctacaatgaaaggcaaagaaatctgttcatatttaggtggcttatatctctttgaccctgttcaagaaacatttgttttacaggatcatccaactgaaatgtcattactagagatcagcaaatttaatttttggctatcgataactggacaagagactaaattgggtaattttgttgcacaagatttaaatccaacatttgatgaagataagactggtttcatattcaattacgcaatgggaaacattacactttcattcatgttcaaatttgactccattaacgattacaaatattttaaacttaagtggtcaagttgcttgtggatgaccatcaataaagttgagtgggaagatatctctgataaagaaaaacaatatataattaacccaacaatgacgttgatcaaggatttagatgaaattcttgggtttggtgatagcaatgataatagacgtgaagaagaaattaaacttgaagaagaagaagaaaaagacagtgaaactgacgaagaaaatgaaagaaatggaacatctgtattgatttcttctgaacagtttgatgaaaatccaactacaattaaaccatcctcctcttctagcaacagatcattgacagtctctgctagacataatcgttcttatgttgtacgtggtaataaaattggagtcttcaaaacaggaagtgggagcgttgaagaagaggatgatgatgatgatgggttagaatttgtatctgtaataaaaaatgtgacaaataaaaatggaaaagacttcagccctgaaaatccaatgatgtatatggaagatagatcattaattcttggtgacaacgataatcttaataaattatatagattggatattgagactggtaaaatagtagaagaatggagtgcaggggaaaatactattgttcaatacggtcccacgaaaaaatatgatcaattaacattggaacccacaatagtcggtgtttccaataacatgatctttaagatggatccacgtatccctaatgacaataaaattgtccaagatcaatcgaaggcatatgttacaaaatataatttcagttctattgggactactgctgatggatatgtggctgttgggtctgagaaaggtgatattaaattgtatgatcgtcttggtataaaagcaaagagtgcgattccatcacttggtgagccaataaaatatattaccacaagtgcagatggtaaatggctattggctacatgtgagactgctttattactgattgacttaacaataaagacaggtaaaaatgcagggaagattgggtttttaaattcgtttccagctactgaaaatgttagaacatacatattgagagtgagccctgagcatgcaagttatatgataacatatacaaagaaaccaattaaatatacacgtgcatatttcaatattggagtgggtcaaaaggaaaagaatattattacatctacgggtccatttgccatcacttggtccctgaacaagatcattcaacagggtaacggtaataatgtatattatatcaaaagatatgatagtgacattattgatgataatttcaaatttggaagtcgtaaacgtgttattgtggcattaaaggacgatatttcactatcaaaattaaaatcattcaagttacccaataaagatgtattaatgcctaagaataatattagagaattttatgaatagtgtctgtacaattatacacagttatatatacgtatatatgttatacaagtttgaatatattataattaatctttaaaatgtttgtgtatctgcctcttgaaacccagggtggccctccattcatcataaaacaacaatctaaatgctttaaacttttgcaaattagttggttgaaaagtggtagtgaaatttatattattgtatttttgattgttatgagtataatttgggtctcttaacatatgatctattccatttattctatcatgaataactcttacaaatcgatagaatcctttactattgagcaatttatagtacaaccattcttcaatactccttggtgactttcgcataacctaaaacctttttaataagtagcctgttaaatatatgtgtgcatggatatgtacaacttacaatgtagcccccctccccatcaaccccattgcacctttaatgaacatatttattgcttattgtcaactcaaaccatcgacgaaatacacaggtctatgaaactcaaattaagttaaatgaaaaacagaaaaaaaaaaaggaaaaaattaaaaattatcagagacaaaaaaaaacattataagccaagaaaaaaagagggagtaaatggaagtgaaaggctaacttatcaagtttaagtattattacacaatttgtttattgatcctcgtgttcggttaagagacagagatacttgtgaatcacacatacacatactcatagattacaaagattgagtagtagtgcactgctagtgttttgggtgtccatatttatatatacaggtatcatttaaaagggaaaaggacgagcaaataatgatcacggatacggaattaaattctatagttataatatctgggttaactatgatgactttaattgttatctatcatgcaattagttcaacttttgaacagaaacattaaaaatacaagctgcaaaaataaatatatgactcttatgaaatgccatgtggtagttcctgacacttattgtttttctttttcttttttacggtattttatatagtgtttcaaacaaatatggaagttggaagaggacgtgcttgatattaaagtttatttaaggtatgtagtgtgtgtattcaattttaatacaatataaaattgttgtcatattgcgaagtagcatattatacatacatacatatacaatatttgtgtcatagctttcgtaccactttaagaataagtggaaatagcaattctgtaagcatgataagccaagataaatactataaaactattacaagatcatgagttgtattcaatcttttaaagaagaaactgtcaacttaagaaatcatatatatatatatatatgtatgtatatatacggactattattatcatcatcattataaatgggcccttagactattgtctacttcatcctaaaaagaattctaccatcaaccctaatgaagtccccgcaaaaaactctgtctcactgatgtaaaccctaatagaaacagaagtgtgaaaaatcaagacctaatgacatttattttgttttattttactgtgggaggccccaacgtaaaaagtgataaaacaccgccgcttgttcacttttctggatgtccaaaataggaaaccacgcaaaaaatttttgtagaaaaaaaaaaaaaagaaactttcccaattaatgaaaaataaaaaaattttttctttttctattctcttttctttttttatttttttgcgatgacttttaataacaaataaacaaaaaaattttttttttctatttttttttttctttaactgtacaagacatttatcagtgattatataacaacgaccaaattactactagtaccaaccatccaaacatttcttttggactactctcctctttctttttctacttccaccacggtttttttttgttgggcttgttcaaattccgtatctcaatttttgatagtggaaaaaatttttttttcttccctctctgtacctactcatttatccacttcaacttcttttctctttctttctctctctttcttctctttttaccttccttaaagagctttacttaatcattaaaagcactcctcctctcttgttcgcttgtccctttcgtctttatcttcacagaaacccgtctacagataaccaatcacaacaacaatggctgaaggtgttttccaaggtgctatcggtatcgatttaggtactacttactcttgtgttgctacttacgaatcttccgttgaaattattgccaacgaacaaggtaacagagttactccatccttcgttgctttcaccccagaagaaagattaattggtgatgctgctaagaaccaagctgctttaaacccaaagaacactgtcttcgatgctaagagattaattggtagaagattcgacgatgaatccgttcaaagtgacatgaagacttggccattcaaagtcattaacgttgatgatgctccagtcattgaagttgaatacttaggtgaaactaagactttctctccacaagaaatttcttctatggttttaaccaagatgaaggaaattgctgaagccaagattggtaagaaggttgaaaaggctgttattactgttccagcctacttcaacgatgctcaaagacaagctaccaaggatgctggtgccatcgctggtttaaacgttttaagaatcattaacgaaccaactgctgctgctattgcttacggtttaggtgccggtaagtctgacaaagaaagacacgtcttaatcttcgatttaggtggtggtactttcgatgtttctttattacacattgctggtggtgtttacactgtcaagtccacctctggtaacacccacttaggtggtcaagatttcgataccaacttattagaacacttcaaggctgaattcaagaagaagaccggtttagatatctctaacgatgctagagctttaagaagattaagaactgctgctgaaagagccaagagaactttatcttctgtcactcaaaccaccgttgaagttgactccttatttgaaggtgaagattttgaatcctctttgactagagctagatttgaagacttaaatgctgctttattcaagtccactcttgaaccagttgaacaagtcttaaaggatgccaagattgctaagaaccaaattgacgaagttgtcttagtcggtggttctaccagaattccaaaggttcaaaaattattgtctgacttcttcgacggtaagcaattagaaaagtctattaacccagatgaagctgttgcttacggtgccgctgttcaaggtgccatcttgactggtcaatccacttctgatgaaaccaaggacttattattattagatgttgctccattatccttaggtgtcggtatgcaaggtgacatcttcggtattgtcgttccaagaaacactactgttccaactatcaagagaagaaccttcaccactgttgctgacaaccaaaccaccgttactttcccagtctaccaaggtgaacgtgttaactgtaaagaaaacactttattaggtgaattcgacttaaagggtattccaatgatgccagctggtgaaccagtattagaagctatcttcgaagtcgatgctaacggtatcttaaaggtcactgctgtcgaaaagtctactggtaagtccgctaacattactatttccaatgctgttggtagattatctactgaagaaattgaaaagatggttaatcaagctgaagaattcaaggctgctgacgaagcttttgctaagaagcacgaagccagacaaagattagaatcctacgttgcttccatcgaacaaaacgtcactgacccagtcttatcttccaagatgaagagaggtgccaaggctaagatcgaagctgctttagctgatgctatggctgctttatctattgaagatgcctccgctgacgacttgagaaaggctgaagttggtttgaagagagttgtcaccagagctatgtctactcgttaaaagaaggatatggaaaaagaaaacaaaggaacttattgaaattttaaagacatgaacttctgtttttaggtgctttattttttttgtgtcttattattttagtagtttctatcttttttgtttttttccaccttttttttattttcttcccatatacttttcttatttttgtgtttcttacctcttatatgatatgatatatatatatataattataaatcaaatatatataaataagtaaatagagtagtgcttagctttgtatgtatcctagaaaaataataaaaattgagcaatctataaaagaaaaaagtgaaaacgaggcaggataaattgagagcaaccaagatgttttacagaatgaataaattgaatatccagctggatagtgttaaggcctgactatatgcttcttcaattaaagttttgggacaagattatgataaatgtattgatcagtgcttactatcacttagtatcaaggaaaatagatgtatagatgtttgtagttagagaatgagatgtagaagatttacttgtgatgtaaattaattgatagtacaagtaaaagaataaaatgtattgaatcatctttcatcactttattattatcttgtttgtttttttattattttttttttttttttttcagatacgataaatgtcacaataaaaacgtaagaggcttagtctatatccaagaggaatgaatcattacgagtgcagcggagacctttcattagattaatgtgctaaaaacagctgtgtttcattctttagccgttcctagagctttgtgtgtaattcctctcgccacttttgcaacttcttccacatgttattcattattactcaagtgtttcaagtcctcaaacatgtggaaatagactttttaggctaagaaaaaacataaaagactcaaaagagaaaaaaaaaaagataatgacaagaaagaggaagaaataaagaaagagaccatcaagccatcagctgccacgattgggttacgtgatgtaaagatgaatgagggggaaggggagtgacagggaaagtggcaaggagaggaggagaaagacatgaaggagaatgtgtggcgtataatattgaaaaatagaaaaaggtgaaagatgaaaggtgaaagaagacagaagtagaaagctgcaccagactgttattatagtatttaacactttacagtgtaactaagatttatgcgtaatatttgcttcttttatttttttgcgtatataaaagtgggttaactaactcacttcacacttgaattatatatatatatatttatttcttgtcaagagattcttcttcagatcttgtatccctgacgttactttcttatcacttatattaaatgtctacaaagacaaaagaaacctgatagaaagtattgaacaaaaaatatgtctgcaaaagatttctataacgaagctagtcaagatccgcagactcgaaaaacatataattataatggaaaccatgtttatccatctacacaatatcaaacagcgaattctaatgttaatgctaatggtaatgaaagccaagacaggggactactaagtaccgtagtcggtggtgccggtggctactatgcagcatcaaaattatcagataaccactcgaaattatccggcatattaggcgcagtaggtggtgcattgctagctaataaattatctgacaagtttgaacacaaacatagccataatcatcagggaggcccaccaaatggtgggttcaataacggattgcataatcaccaccatggcaatcatggtggaccaccaccaccaccacaaaataataatgggtttccatttagaggcaatggtgaaccaccttttaatcatgataatcctaatggacattttgtgttcaatcaaggttcaccaccaccaccacaaggtccagattcaagatggtaattattttcacaaattatatattcatagcctccgttatcttcctctcttcttcaaactatatacattcttatgagtaaataacatatacatacaaataaattcagatttatgtcttttgtattgttttttttttgctacagtgtatcatatacacccatttatatgcacgtatgtatacattcactttatttttagcgtcaagaggtaaatggaaagaaccacaccatataatagtgtatgtcttcttgttcaacatggttaacactccacaatatcagcatttaatattgggatgtattcaactttattggctaattgttgtttttttttattgtgccatactgagaggagaagatgtatggatgtataattaaaaatttttttatttttgttttattttgcgatgacctttgatttatttcaactaagaactatagaggaactcagtatctggtgagcattgtatttcatttaatctagttaattatattgtagacagaaaagtgctacctgctttaaccactataagttttgttaagaacagggactatactaatctgtatcttcatactaatataaacgcacacataaataatttacatagtatcaattcttcactatgaaattggatacttctcacatgagatatttgactgctgaagatttccaagttcttcatgcagtagaaagaggttccactaaccatgaagtggtcccaactactttaatacatcagttatctggtttaagatccatttctggaacaaatagatgcatttcagatctagctaaattgaaactgatctccaaattaagaaatgcttcatatgacggttataggttgacttatagtggtattgactatttagcattaaagacaatgttggatagagataccgtttattctattggtggacccatgggtgttggtaaagaatctgatatatataaagtctccgataaagaaggtgtaccaaaagttatgaagattcataggttaggtagaacgtctttccacacagttagaaataagagagattacattaagaaaaatgcaaagaatggtgttaactggatgtttctatctaagctggctgcagctaaagaataccaatttatgtctttattatatgctaaggggtttaatgtgcctgaaccattcgataattctagacatattatcattatggaattgattgatggtttcactatgactagattaaaatatcataaatccaaatttaacatacctaaattatattctgatttgatgaatttcattgtgaaattaggtaagagtggtttgattcattgtgattttaatgaatttaatataatgattaaaaaaacagcagcaactagcgatgatgatgatagtaacaataaagttatcaactcgaatgattgtggatttattgttatagatttcccacaatgtatatctattgatcatccggatgcagaattctattttaaaagagatgtggattgtattcgtcgtttctttaagaagaaattaaagtatgtacctgttgtagattctacgatgttggatgaggatggatttggtgatggttataaatacccgtaccctgtttttcatagggatattaaaagagaagacaatgtagatgaattattacaggcatctggttattcaaagaaaaaatccaatgatagagatctagagattgcagttcaaactatgaggaaccattcagactatgaaagtgatgatttagatgaaaacagtgacgttgataacagcgaagaggaaaatttagatgaatattactatgattctgaggaagagaatgatgaggatgactttcaaggtgataaagatagtcttgaagaagaaaatgaaaagattattgaggctttaacaacaggtgttgggaaattgaagatggacaagttaggtaattatatattagtaggagatgatgatgaagaggaagtaaaaaataattaatcagataaatctataaatatagagtattcattttatcattaatatcctatacacacatacgtacatacatatatatatatatagaatattgcataagaaaaagcagacatttataaatatacttttttctacttatcatataatgagaaagaaaaaaaaatctcttcattgactgtcacaatgaaagttcaacaaaaatattatatagagttatgtaatcattaatcatattctacaccagatccctcaatatcgtcatcgtcatcatcatcatcatcaatttctattggaatatcctttaatgaagtggaaagatccatgtttatactatgttgctggttatttattattgaatgtgatacttcttcaagatcattttcttcctcttcttcttctttatcaaattctttaacttcctcaatttcacttccatcagacaaatcactctctgcttcaaaatttgcatctagcgcttcatcatcttctgagtccaaatgaacgtcatttaaattaaacgtattagattgttcgaattgtttagaagctgcctctaatatactttgatggccatttgtattgtttggatcaagactgtcttcattatttttagaattattaatactgttgttgttatggcttcccatgttattattattattactaattttggattttgttttagcttttaactcctcactcattgatctatctacaacttgctttcttttaacatattcatcgattcttgtgtattcattttggtcaatcatagagaattcaaaggtttgtcccttctttgtgatcaaagtcatgttgaaagtcaacctggtgatagaggaataggtgatagattcgatatcgtttgaatcaaataagaggattggttttttaaacccgaaaaggatattatctggcaaaaagtatagtgttccttcctttgtaccacggtgacaattaattgaaaaagaactgtgcataggatctccattagaggagaaagggttggatatcctgaaaccggtcaagatcgcttgttttctaatataatctatacaggaggcaaaatcggtgactgaggtttccaagattccgagtttatggaattggttcagtatcagatcattggctaagttaattagtattggttcattgtacgagtttgaatgagcatatttgatgaaaaggtaggttaagtttggtttctctgatacgggtaagaacacagccatttggatattggatctcaaatcatgtatacttaattcaatttttgaatctctctctagtgataatattggagctttatcaatggaagatagatgtaaaaaaaaattcaatttttttcttaatggagataaaacagacacatcttttaattggaatataatatcatcttgagatatcatattttgaacagtcagattgtcaggataaccagcaggactatttctactactctcatcattattattactagtattataactactattattcaattttcttcttttagaatcatttgttgattgattattttgatttatggcaaattcatataattctttaaatgtgtctaaagtgttaggcaagattgaggtaacttttttgatctttttttgtaaatctacaggtaaatcatccaaaaatgacatagtagcataggaataaaatattattatctcttccttttgcgttttttttctttaaaaaatatatatgaaggataacttctcgattatataactatggaaatatataataattctggacgatagcatatgagaataagaacaatgaggaaagaaaagttattagtaatgaaagataacctatcttgtagcagatcaatatattcaaattacgacaaagcagtttatcaaaaaaaaaagaaaaagaaaagaagaaaagctaagacctaattacacaacatccgtacatctaactagagtagcagacgctaccactttcttatctgctgtctactgtcgtaaatccccgagagacaatagactattgttgtcttttccttttttccttcttccccgctcttcctttaactgtttattttttttaagggagaggctgttgggcatcgcagcaacaaaaaaaacgcaggagaaaaggtttcctttttttgttttttgtctctatattatattattttattttaaaggttgttggagatgtgtaaatgaacaactgaacaaatgaacacacagatggttgagtggtcgactagaaactatacatacacaaaatacaagtaagggtcctgtggctgtgaagctatcgtgtatgtgtgtgcatatatttcttttacggaggttaatggaatagtgatggtagcatgatggtttgctaagtgacttgctggctggtcatatgtacagataactcttcgacattatatatatatatccctgcatatatggatgtttatgtgtgtatgtatttttttatttactgtaaattatcttcttgaatttttatttctctttctctctctctatatacatatatatacaaatatataagcaagtattgaaatattaagagatattttcaataatacaaaagtagaaaacaacagataatatagaatagtaataataacaatatttattatggtgactactctaactaaaaactatatcgaagaatgttcttggaaacctgatttatttaaggacaaagtctgtctcatcactggcggttctggtacaatttgtagagttcaagtagaggctttggctttattgggttgtaatgttgttatagtaagtagagatatcgaaaatgcggagttggtggaaaatgaagttaacaatttaacaagtagaaaagactcttgttttgctataaaaaatgtcgatgttagagattatttccagatggaaaactgtatcaaaattactattgaaaaattcggtaaacttgattttttgattgctggagcagctggaaatttcgtctgcgattttgctaatttaagtgccaatgcattcaaatctgtcataagtatcgatctcctaggctcctttaatatcacaaaagctgctttaccacatttaattaaaagcaaaggtgccattctctttatatcctccactttccacaaatacggtgttccattccaaggccccgtaggtgcagcaaaatcaggtatcgatgcgttgtcaaacaatttagccgtcgaattgggtccctttggtgttcgatcaaattgtattcaacccggtgctatcaaagacactgaaggttttaaaagattatctaacccaaaatatgtagatgatatgatcaaaaagatccctctgcaaagattaggtaccaaaaaagatattgcagaagcaaccattttcttgttgtcacctgctggaaactatattaacggtgaaactattactgtggacggtggcatgtggcatactgggactctatttgcgaatagtgatatgtacccagaacaaatttacaaagggatggagaaatttttaagcctgtcaaagttataaattttgtttctttatctccagcaatggtagcttattctaatatttatgcttcttgatattgtttctttctttttcattcattataatattatactttatcctcttcaaatatatttacatatatactaactagaacacaatatgcaaagaaatatatatgtatattgattttttaaaattttctttttttctttattttctttatacttgtgaaaataatcttttcccattttgattcaacccaagaaccatatcaacttgattcatttcaagatcttgtggttcctctccatatgattcattgtcagtagtattactccttttcttaatgctttcatttggtatagttgcaacattacgttgagacaataatgctttaataaatggcagatagtcaatctcattcaaaatatctttaaatcttccaaccagatagttactcagtatattgaaattagaccgtgcttcattattcacatcacaatttttagctataatcttaaatagatcttgaatacacgaattagctaaattatctttatcaagattctctttcaataaatcaaaaattggatcaaataaattgttcgttatcatgaaacgattataatatttatcatttaacgatattatattctttatcgttcgtaccgcagtcaatcttagttgtagaatatgggttgacttgataagtttgcttatattagtaagaattccattctctaaaatgaatttccttgaaataatacgattatgttccgtagcaataaatgataaaagtttaactatatgtatcaacaaataatcatcacattcttgtttattattattgttatcattgtcattattgtcattatgatcagtatttgcggtgtttgtatccataatcaatggagaaaataactttagagctatttgatcataaaaatttttaaaataacgttttaactgaatattattattgtcactgtttcctaaatctttgtttaaatcactattagaattaaaccagttattttgatctgtatcaccattatcattagtatattcttcatgttccatcaatgaactgaaattgaaattgctcaacataccatctgagtcatattcaccttctgtattcccatttagatatccatctggatgtaacaaagtattaaatgcctgaacgacttgttcacgaagtccaggtgatttatctgttaataatatagtagccaagatagacaaaagtttcatatcctctgtttgtttctccaaagtatcattatttcccttcctagtcgcgtagtagtagtaagtttggtcaacagaagaaatatcattattactagatttttcatgttgaacattttgaatcaacaatatgtcatgttctattattgttataatcatatcggtggccattattctaatactactatcagtttctgtattaaacgcatattgcagtacattaaagaaatctttttcaattaaaaatttataaaattttgttttatcacttaattctaaattttttgacatctgaatacattgatgtaacagttttattccattacgtcttttttctttcatttcattatcatcatcactagccatagttgaattcaaaatattcgttgcagaactaccttcaatttcatataaattgataatcttgcatagaaatggatctgtttgcaaaaaatttataatacatgtctcaaaatcaataatgatatctaatattaaattaatattattatcatcaaaaaatctcactaacaccacatctttcaaaaattgtagtctaaagcatttttttatgatctccttcaactcattattttcaacaggaagaacttccttaaagattggtccccttttcttcaaataatctctatgattagctttcatagtggaaaattctgtatcatattccaatatcccaataataccaataatatggttgtcttctactaatgattcaatgatttctctgttattgtataaaattaatgtttttattatactgctcagtaacaataaatctttcaacaagttttccttttcagccttatgaaaaatatttattagaagatccacgtaatttgatttaaaaataaattcaattgtttcatttttcaaatattcataactaatattttcatttaatatcttaagagaatccattaaagttgctgtgtcttggtttgaatcaattgaaggtaatgatacaggccctgcaataatttcatgtgccgaacccattccagaatcgcttgatctcactgccactaaagaaatacttcttttcaaattacgttgaacttgaacaagaaaattacaaatcgcatcacatccagcactttcctcaaagcttaatgcaatatcttcacctttgatatctttccaaacaataagagtttcttcttgcttttgatattcaacatttccttccaatctagattccaacagaatttggtctggtatatcttcattagttactatcaaataagcttcatagactacttgatccagtggagctatatcagaagatttatcattagatggcttttcagaaatagagtttattatttgtttaattttaccagtacagaacccagtaccagtatctttccattcattgtcttctaatatatatactttaactcttttaggatctgtatcattaattttcaaggcatttgggagttcagctggcttattatcatttgattccttattttgtcttaatttaagatcatctgtagtagatgtattattattatcctgagtagcactactatcgagagtaatcattatattgttatttatatgtttagttgttgcgttttttggtgatatttactaaatattatattcaaaagttgtaactaatgaaaatcaaaataaaaaataagcttaaagcaaaaaaaataattttactgtttttagtaaatcttgataattatatagagtaattaataaatctgtgttggtattattgaaatatttttttgttattgctcttgttagtttcaaatttttcatagaccgctttaatataaagataaagaaccaatgaagttcaaaataattgatggtgttggtaaatttaaagtagttagtttaaagatatctaaaatgcacacattgaactaagtcatgtattgatttgggtatgtctactctctttgacattcaactaattaatgacaaataaaaaagaaaagaaaaaaatatcctagaaatatttttctttttctttttgttttcgcgttttttgttttttatttttttcttttttcttttttcttttttgttttttatttctccttgtatttttttttgtgtaagttttaaaaaccctaacaagaatctgacataaaaaagtaaaaccaactgattcttgaaatgtcctaagaatagaatcagtaaccctaatgcaaacttagaaattctgcagacagattgcagcataaatattgtaatatattatttattcaatctacattataaaaactatatgaatttacatttattcttattagtgttactaattaaaatttcaatatttgatcagttcccttatactcatatggttcaaacccatatttttcagcgaaatgtctaggtataaaacgaccacctacataatgtgtggttctctttggatttatgcattgactacatggttttggaacagttaaggatacgagaacacttggcacataagaaggttcattctctattggtccattatctacatcccatcctgttgggatatcaaccgcaacaactggaattttatcttccaatttattcagttcttcgacaattgtaccgaatggttctctgataggtggtttgaatgagaatccaaatattgcgtcaacaatacacgcaatttttcctggttccaaatattctgtccatttgttctgctgttcctctgaaaggattggaacctggaaaaattctaattggttaactaattgactataaaactctgttcttttacttctaacaggataatatacaattggattataaccaaacaattttaaatgtcttgcacatactaacccatcaccaccattatttcctggccccacaataataaacacaccattcttattcctgttttgatttaatggatactcccgttgaattgcttgagctacactgaaaccggccaattccattaactgttgtagagtgaatcctacttgaggacccatcaattccttatcaatttcacttgcagctttagatgaaactagttttaatatagacatagtattcttttgaacggttttttttttctttgattagattcccaaagactaaaaggttaattgaagatggacacaaaagcgacaacaatagcagaagataaaccataactttctcttttcacttagtgtaaaggaagaaatcgtctatttatcttgtttgattctttagatatttagtcaatctcttggttaggatcctgtcatcgcaattctttgttctccctctttctcctgacctccctacttttttttccgttgttggaaataccttcatttgatcttttttggtgacattattcatattatctcactattttcctttataggtaactttttctattttccttgaattactttcgttttatacagaaaggtaatatctatgtctttaattatccatacgtcatgctttttgcggtagtagtatgtttagttactttataaaatattataaatcaagtggatttataatcacctgttttatgatcttgcattgttaactgcttatgataaaagacaatttatatatttatattattattaaaatatctatctaatattttatctatcattttaagggtaattaaaggaaaaaataaaaataaaagctacatgatataaaatttgtatttttttttgttttctcttatcgatgcatttatgtatgtaatatcaaaaagttcataaatcgttattatgattaactaatcttttttaatatcttgtaacatacttctaacacatcctatgtcttcaattaacattcttcgtaaccactgcgtttcctgtctttggctttgaagttctctttctaactgcatgatacgttgatccttttcctgaactatttgttcaaacacttctttcatttgtttattaaagttatctattattacactatctattttgttttgtctagtagatatcatattgttgttgtccatattattaggcatgttattacagttctctatagaaacattagtattagagttaagttgtaacatttgatccattgtattaccatcaaatgcatttagatccacgcctttatttctccaactattattgtttaaattattccctgtaccattgatgccattcaaattgttactatgctgaaaactgttcagattattattattgttgttagtcgtattattgagtactggaccgtttaaattgtaaaatgcttgattttgattaccatttgacaccagattattaaaatctaattgttgattattatcaagacttgtatcgaatccagtaccaggacttgtaggttgcgtatagtatccattcagagaccttgatagatttacatgatcgtctctattcataaatatcgtttgtagtctccgttgcaattgctgtgaaaataacccatcttgtccaaataatccattattggacttattttgattagaattttgtagtatttgctgttgtgatttttgttgattttgatgtagttggagaagaccatcatcggcaatattaccactagttcgaatattcttattattcttccaaatacttttttgtatggtattctttgtagttttctttccagtcgtttgtcttgcaactgttgtttttttccttgtatacttctttttagattttgtgttatttggtatagtagtgtcagtggatgtaccattagatgttaatgtagtgttttgtttatcatctgtattagaactattacttgaaggagtattcgaagtattatgattactactagtgtcatgagaattgattataatatcactattaatattattgccgttttctattaatggattattattattattactgttattatcaattccattgctactatgattagatccattcttaagtgcattttttctaacacgaatattatttgaatttatcaattttccagtttggggatcatataccgtaaaaatacatgtcgttatagactgccatattttatcctcaataagttctgaatcgttcttgatttgccataaatgttcatcgagacgctgaaaatatttggcgtacggactaacttcaaaacctaattccagtccttttataatttgcataaatcgttgatataattcaatagctgatttaggtgacgatgatgatttatctataatattatctacaacagaacttgatataattgcagtatatattaacgaaatcttttgaaataattgcatattaaagtgatatgtattatgaatcaatgtattactactgccaaatgtagagatcgaatctggtgtattatttacattattattgttgttagtattgttgtttgttgctgaattattgttgtttgttgctgaattattgttgttattaatagtattattattaccattattgtcgttatcatttgccagtttattattttcatttatattattcacatcattcaatttcaataacccttcgtctgttgttaatactttcatggcaatattagtgtttgatactaaagctgcaggtgtatgtattgttgtatgtggtgaagctgcagtgctttgcaattggttgctattaataattgcaccattagataataaattgtatgctctaattgtaaaaacgtcaacagtattttgatgatgtaataaaccaaatgttgtcgattgagaaggaataggtgtattttccaaggtcgatggtgcaacaatttgattatctagcacattaaattcaatttcattcatatgtttattattgttattcaaattatgaagaaaataaagatttgtatatcaaaaaacaaaacaaaaagagaaaggaaggaaggaagaatatgtgtgaggatagctggaacaaatgtttgtgaattaaaatatattagaattaagatcaaatttattaactgaatttaacaactattttggtttagttatagacactatatcaaactttaagttgatatagtgatattaatgatatttttttatagttcaaacttattaaaattttcaaaagtgtactatgatacagaattggtgaaagtagcaatatttttcagattgttttaattagcaaattttcagagttcctaatcttgacaagatgattaattttatgtcaaggcctttaactcttatagatgaaagaaatatttcgatgacttttatccagtccgcaagatgtttgatttttttttcttttttcgatgttaatttttttctcttaaaatttagttcgggtctctcggtgtagagaggcgtgtctttatttatttctggttcaaatcgaatagaactgattttcaatcgattatagaatcttatgaagattcactgtacaaggatctttgcaccttcttcttttcttaaattaacctcttacaaaaacaatgtaaaaaatttgtagtaaaatgtgtttttcattttgtattttttttttacaagaatacagattatttattttttagtaatgtatataaaatatgtaatgaataaaaaaaataatatgatagaaataaatatctactcatacaattatgaaaaaatgacagttctttaggcaaaatgaaaacatgtaaaacattaataacaaaattaatttataatcaatatagtaaaaagagtgagcgtcataaaattggagcgatataaagcgctttttctaattgcaacaaaaaaaaaaaagaaatagtacaataaacttgtcgtaattccagcaacaagaatgatatgcaaactagccaaaatatccaaatataaataaattatcacagttataatcaagtgagatagacaggagtaacatagagtaatagtattataaacaaagaacaaaaaaaaattgtcggatagagtaacagatggaatgatcataaacatgaattaaaaatgtaagatatatggaaataacaaaatgaacatagagaagatactaaccagtaaagtacccaagtaacgatgtaaatatataagatggatacgatgattttcttttttgtaccaaataaatattaaatgaaagttttcttttattagtgacgcattagtaaacaaatgaatgtaataataaaaagtagtgattaattaaatagatgacattccacaaaaaataacaaacataaccaaaaactaaaataatatcaaagaaagtttcagtgattataatacattatatctccagattcacatatcatgaatttttagagtatgttgtataactataattcatattattattaggaattatattagcagatccaggacggtgtccattattacctatattattcacattattggaattattagaattaatgtttcttttgctgttcggacccctaacacctagtgggttcttagaaaaacttaatctaataccacccttgttattagatgtggctcttggtaattttctaccatataattctgccaaagctctggtagcataactaacatcttcgaattcaacaaagcacattggtccgtgaccatttccattaccatttttatttctaaatgataatcttctaaaacctccttgactggaaaacaattgtcttaactcttgttctgtagcatcaggcggtaaattaccaacatataatgtgttacatggtggattctggtcggcaggatttgcaggtggtggaaccttggctaataaagataaatcggcttctgacatagtgactgtaccagtagctgctggtaatgagatagttgaagaattcaatttattgttgccattaactgactgtgttggggtcatactatggctaggtacatttcgattgatatttgaatttaatttagttttaacaggggttgtgtgttgcaaagtattcaactgagtagtcacttgttgattaaaagaggtatctccgaccaagacgttttgtggtggtcccatttgatttattaaaccgttgtatgtgggaatagaggcagtagatgcagataaagaatttgatatgttatttataggaatctgttgatttagatccatcataggcaaagttgattgtgtttgaacgcttgtggaaccagtaactgtaggaagataaaaagcagaactttgtctcctattaacattactattattactattattattgttgttgttattattcaaacttgttgtaatggtattagaaccccatggaacagttggtgtcgatggttgaggggtgctagaaaaagcatgaatacttgaagtaagaccattagttccccagatattatcattgatctcgtcattctccataagtaagaaagacttgccagcatctcttgcaccagggttaatttctggatgattagttggtacatgacttacagatgatgatttagatttcaacgcagttggatcttgcgagtttgtttccaatgtgaagggatcactaaaagagaaccttgaaagttgaggtaaaaggcttccacgattagttgtgtttttgttgttgcttcctaatataattgattgtggttggttttgtggaataggttgttgtgaattttgttgtgaaatattgtgagtttttaatgtagatgctgctgctactgaggtaaattgaattggtttttgagtggaatcatcaattagttcaacatgcaatttatgtgggggatgtagaccaaataaattacttttgttggttagaatgtttgaataacgaatagccaattgtagtgtattgaattttgccacaatgactggggatgctgtgggattgtttttcaattcagttggatttgagttatcattttcatggaataaatttacgctaaggacgttttcagccaaggcaaatatgagaaatgtttcacgttttgtgatatcctttggtaagtttgatagctttatagaatatgtagttgacacaaggtcttgttgggatgaattcaagcccaaggtaaaactttgtaatatagatgtgatgttatcaggatcattttcagaaggtatattttggttagttagagtgtctgttacattttgattcgatattaaagtgtctaaatggatatttggcttttgacttggtgaaatattgtactgagaagttaattgcatattatctgtgcttctatcaaaagcaacattactagttgccatattatatgacattatgaatcagttatcagtgattttaaaaggtatttgaaacagaatataagtaaaatacagtaaagtaaagtaaagtagagtagagtaaagtaaagtaaaataaaataaaatacagtcgaactatagtaccaacagaaaaagtaaaatacctataaggataaaaatataaacaaaatagaaaaattgataaaaaataaaaaacaaaaaagataggtaaatactaacccaataagtaaatgcttgttgatggagttttcagacacctatcaattataataatagagtatgggatcagcgaagaaaaaaaatgaagtaaaaaaatatatcttactattatttttaaatagattttaattgttgttaagcagagtaggagtaggtagtaaactcaaaaaagaaaaaaaaattaatagttattattataacaatatgcagaataatatttatttatatgtgttgttatctttagagagatgcaggatatatgtggttaatgtttgtgtaaaaaacaaatttatggaataactatcaaatgatgtaaaaaaaaaaaagaaaaagtaaacacctaataattaaacagcttacgggaaatatgtaaaattgagttacgttatccttaataggccaatacactcagatatatgtatgcttatatgtttgtatgtatgtgtatatatcagtaaaaattctttaggtcgtgaaaaatgtgatattcaattgtgatggttgacaacaggaattatttctaaggaacagttaagacgtatactttttctgtacgtttgttgatgttattttccttttcactaaaatttcccaaaaagtttggaataacgttcaaccacacaaggtgaatgtttattttcccgttagtgtgtattgtagggtaaacgtcgttgcggcgattaattttcgcgttcatgcatcagtacaccacattcaaaatattactcagtcattttttacgaatcctatgtataaagtttttgttattttgcagttgacaagaaatttgtggcagttcaagttgtgcacctcaaggaaaatttgacagtttctttttttttttctgtcaagaaggaacagaacgtaatttccaggggtcttatattatcaccggcaatgattattgctgctggtaccaagaatatgttagttaaaaagatcaaacctccagttgaaaatgaagaaacggttatgttttacttctgataatgttaaggcagactgcatataacatgggtctagtgtattctcagtttttgttttattttttttaaggaaaaagatcatcttttgttctggaatatgatcagatattaatattattatgtaaaattcaagggagttacaatgatatatttaaaacttactatttgccatttattgcgaaggaacgaataaaaagctgcaaagatgtttatattcaaatatatatatatgtatatatatatttgccgaattattctttgatcaaagaattataacaacatgttggataatccagccatatatccattactactttactatgtgtgttgttgtcttcatagtgattaatattggtagttaaactatcattacgctgtaaattatcaatatcagtattattctctatgataaacgtgtcagaattgtttttattattaattgcacttttcaatcttttgatatctctttttatctttaatgtatctgttaagtttaaatcttcgatggttaatggctctttaaccaaatagggatctttaaggagtattctattttgatttgaaaaatcaccgttgttacagaaaggtgtgtttgcagtagctgacgtatctgtgattgttgcactagaggatatggaggaggatttccgaaaagtgttaggaatatttatatttactggacaatcctcggttaatgtactagcatttgaccattttctgaagttaacactaactatatctctgctacttcttctgtagttaatctcatcatttatccttatattatcttcatcaacttgaaataaactattggagctaatagtttcttctcctaaggagggactgtactgtgattcaaaaccttgatggaaaattctatttatgtgtaactcaattggtttcactgtttgagttccaatatgacaatacggtttttgttgttccttttgattcttaaatgtaaaatccctagtatacgatgtcttcaaggatccattagtttttttatgactattactaatacttgcagtattgtttgtgtaagttaaaaaattcttgttcttatacaagtccttcttgtttttacgagtatgattgatgccggtttctaaacttttattattaaatataccattttctctcttacctacagtagtggagttataaaagatatttttattattattgttattattgttattaatgttattgttattgttattgttattattattgttgttgttgttatcaaaagttactgcaattttactttcttcttctaatagcccttgttgttttttactatgtgatttaaatttacgatttctgtatccattcttatagttcttattacttacgacttcagacatttttttactgcaagactaaaatatctaggatgctttaaaaacaaaaaagtgtacagtgttaaagacaaatatatcacttgtcttgtcagttatgttttacacctttttatgagatataaacttttatactcctacagtatagaaagtggcatatttaaaatcattaaatatttaatttaacacgcttacatatcaatatttctgagtattaatatatatatatatatatatatatatattgaggagaatattttcataaacagcattaaacatatatttaaagctacaagtaggcatttaaaatgattcaacagaaacatagtttacttcccttatctttccccctcccctttttttttagttttaaagcggttcaataaaataaaagctatatatcggcgccattaatggctggagaaataagcaacgacttagtgcaataagtgcagatgattaccttgtttatatatatttcctcctttggtgtgttaaagccacgagtggctgaaaatacatgtaattatatatattatatatattattaagtatactgttcattttgaatctatggtgaaaatttaactattgcagcaactaaatatttctatttcaacgtattttaaattctttattttttttaaagattataatatggcatcccattgctttttaatgatcttttcatttatgacatcttacgttctaagtataatataatagattattcattaagtactaaaaggaaaaccttttggtttctttgtttaagtgtcattttttttttatttttttttttttaaatttaaaagtatacatatatatatatattgaggttattgttactatcatcatccaatatttgcatatttatatatttgtaaagatatatttaatattgaaacatatacaaaaagggggggggctgaatattaaaatcatgatgatcatctacttatagttttcttcaatctactaaatagactctgatggtgtggtgtttccacatgacttggagttgttgtatttccttgggtgttagtgacatgttcttgcttcattgttcttggaatagcctcttctccagaagcattccccttgtatgcatattccatatccataatcttgctattattgttatcagtggtggaatttttcactaaatgaaagggattgatatgatgatatcctggttgagaactcatttgaccggcacctggaattggagtgtgatgaccctttccttcaaatccaggacaacttgtatctactgatcctacaggaatatggctatcatccatttttcttgcttgtaacattgcggttggttgaaactggttggaaacataatgatgttgtttttcccgtggatttgcctgcccacatcctggaatttggacattagattcgatgttgtcttgttctttatcatatgtctcttgctgatattgttgtgaatccatggctggataattgttagcttcatctttacggtataaatgtgtgggaggatactgttgcttctgtccctgtttatgttttagttcttgctgcttatgaaacaagttcatgtagtcaccttcggcataatcatcctggccttccccaaggattttattataatcgctaacaccatggtatccaaaatccaaatctctttctcctgtttgaaactttctcatcccaatgtttttagtatctgcttcagttagcgtacttcttggttgattgtagatatccttaccatgttggccaacataacttgaggcacactgaccctcaccaagaagtctatcataatcttcaactgtatgataacctaactgcgatgtgtctttactcataattaattttatgttattaatagtttttattatgtttaattttataaactttactaacttatatagtagtcggtttgtaagttactggtagatagatggattaacgaagtgaggaaggtaaaaaaaaacaattaaagaacaaaatgagaaataaatgaaatagtacctttaaacacatcacagccatatatatatatatatatatgtgtgtatgtatatatatacggctgataattacctgatttgtacagttacattttaactggataagataatattattactttatgatatagatacaatactcactctcgttaaaggtctaacattcttacaataaacagcattacccctaatgtattgtaataattttattacaatttttttttgcataaacaatactattgttattggtttggacaataagatgagaaacaaagaaagaaagaaaggataaagatagaataagggtacatggattgttattgtattaattcagagtctttgctgaataacaggatctagatttttctaatactagtaatagacgtcgttgtaaagcaacagtttcactgttgcttttgttcattatttgtgcgcgcggcgtaatcaaaacatttttacgcacataacagtagtgttgatcgatggataaataggggtctctaaatatgtgtttttttttccattttctgatcattagagggggggcaggtataaacaacaacagtcctcaattataaccaaccaccttaaagcgaagatatattttcaatggggttgtttccccagggcattttcctttgttgtcttaattattatttccagtgctttacatgctgagcaaatgagtggttaactattgccagaacaaaagttgttcagtatattccaagcattttgtaaatttcttcattttagttatttttggatagggagaaagggaccgctgtcagaaataggattgctgtaaaaatatgtaggtgctattattgttacacgcaattaaaataatcctatagtctgatgttctagggttttattttgtttactttcatttgtgcttttcgtcttttttttttccctaaaacaaaatcaaaaagggttcattgaggattatcaatatcgaaagattttaatgttcttttatttttccccatctcgtttgagatcaaaaaataataaataaaaaaaaaagttacagtaatggagtgtcatagcatatgtataatatctccgcatatgaacttaacaactatattatgaagataaaaaaaatgacttggtaagtaaaacaaaaagtatagttattcaataaaattcagattttttatgttataaatatacatatatatatatatatattttctctttgcgaatacatatgaaatcatattcaaaagttaggttctcaaaaagacctaaatctaaccaaaaaagtaaaccagttccggtaacacaagatgattattatttagaggccattgaattcgaagaacaggcagaaagatggctgttttcagatataaaaaaaactttaaggttttatatgaaagctttcgaaatgtatgaacttggtttaactgcaccacaatcaaccgataagtgtacttataatatcttatataacgaaacaaggctattattgcagttgtattcagactacatggctaacaatggatacattaatgttttgcaatacataaatttggatgatattcctggtgtagaaaatattttaaaaccaatcaatgagattattgaaagatttgaaacggccttgcaaaattataggtcgatggatacttgggatttacagtcaaatttgttgacttcttacctgtttttgatagaagatcatgataaatacggtttgaatggtgggcagattgtggatttaacaaataaattcttcactctgtcacatgaattggttcttcatcagcttgaaagcatagataatggaggaaatattatggagtacgataaagttttaaatgacgaagattttaatgcttttgaatcaataaatggtgatatatcagaaatggagtcgagggacggttttggaatcaaaataaataaagatcattcttatataaaagacttagtggaggtatcagatgagattacaccagaatcattaaccgatgtaatcattatgtgtctgaaatttaatcaagctctgttagaaattatggtagagactaaacttgaaactggtgatcaattactaaacgttatccaattgaattatctagaggatataactagtaaacaattatgtagggtaagcgatattatcgagtctcataaagcaattttgaattgtaaaattagtgatattaatttagctatgtatgcagttaaaggaatacaaatattttattcagatccagatgtcaaaaatttaactacatatttggaagcaaacccagacccccgtattgatttggttgatctttacttggtgaaaatcgatatctttggattagctattgattacatccgcgaagagttttttgatatgaaatgggacttttgtacccaattaaatcatctattaactagtacaagaaatgaattaagttataagcgcaaaaacataatggcttctcacaatcaaattgaatttgctaacttaagtaatgttgtatttcaattatgtgatgttacaattactgcagcttctaatgaattaagaagatatgatatcagggtcaagaaaaatggttctactgcaactgtggataatgtgcaatcaatattactaaaaaatgcaaaaacattattaaccaatgcacagattatctcagagaaatcatgtgggatgcaagagactatcgtggataaattaaaaagaaattacatttacaatgaagctaaaaacaagcttgcattgttagtatcaaatgaagaattatcttaatggatctctgttcatatacgtaaatcatatatattaaataaatgtgtacatacgcagataaggtgtcatttatgacataataaataggtgtacctccacaaatattaacccaatgtactttatactatatgcaatagaaaacgttatcttcattgttcccctggttttttatttttttcttttcttgctaactgttatcacagctaactaagcgccattcaaagcctattagacggcatttcaaacttgatcatggtaaaagatatgtccatgtataagacattggtatttttatcagaatctttgagactacgcctctccatctttgagaattcaaaaagtaagaatatatatggaaatttttttttaatggctggttttgtattgtttttctctgatcaaatttccagatcaggtaatttttaagtaaatttagtttacagactctacttacagttaaacttccgaactttaagtaacggctgggttttatatcaatgatattttaggtgatatctacaattttttggttaatgctatttaatacaaatatttttctgttttaacctttgtactgaaactgtaaatataaaccttctttagatgcttgataaggtcatagattcttgcctcgtttctcctctttcttttgttttttgctcgagagataaatattcaaatttaaagacaataaacatttagactcagtaatgagtaacaacagatatatgtcaaatcaatataataatggtcaaaattattattccaatgaaatcacggagaatactatgtttcattactatccctataataatgtaaataataataatgataatgataattattggtcaaatcaatctaacgtcaatcagttaccagaaaatggttatcaagatgaagatacacgtagttcaaaacttacagacgaagtgcttgaccattattcccatgaacctatgagcataaaaagaaacaaaacagttgattccagtatattgaggccgaataatcttttgcaaggaaatgtttctgtaagagctgaacaagacatactgttacaacctaatgataattctgaatctgttgcatatgataattttattcgtgacagttcgcataatatgacaagacctaagcctccatctcaaacaaaaattctaacaccacctgttgcatacaacgatgtttttgttcagaatcactctcacagtcaacaacagaacaatgcagacaatatgtttcaaatacctcagattaatgtgattcaaacaccttccgattttacttatccagagaacagtcaatttaacaattcgaatgtttatagtaatttgtcatattcacaatctggtaatttcaatatcaatgcaggtcctcaacaatactctagccaacatccatattttaatgaagaggactattatcattctcaaaactatatcactaataatacgggtagtaataattatatagataacagatttgatagcaaaaatagtttatctcaaaatagttttaatgaagctccaagtgtaatatcgattgatgaagatactaaaccaattctacaacaacagatacaggaaaataataacaatctatattataataattattctaacgatcttgaagatttagaaagtgtggaaggttatgttgatcaatctggtgatgattatcaaattagatcatacttagataatgacggtgaaatggtgaatccctatacaaacactgtacctgtgatttatgatgaggatgaaaactttgaagatgttaataaattaagagaagatgataatataggtcatatggatttaggtgattctagtaactttggttataatgacacaaatacaatcgacaaattggggatagttaaaactagatctatcaattctagtactaattcatcatcgaattcaaagggtattttactgacagatctcagtgaagataatgtgatatcagcagaaggaaataacgctacggtaaaaagatcaaatactgaaataagaaaatttaaactttggaatggtaattttgtttttgattctccaatcagtagtactcttttggataaataccatgttgtagtagaaaaaccagaattattgtcaaatgagttcaaatttatgagatatcaggcaattacatgtgaaccaaatgaattaccgctaaaaaattttactgttagacagttgcaatacttgaggccgagacagactgagttgatgattgtgattacaatgtacaacgaaaatcatattttactgggaagaacacttaaaggtgtcatggataacattaaatatatggtaaaaaagacgcattctagtatatggggtccagatgcttggaagaagatcgtcgtctgcattatatctgacggtagatctaagattaatgagaggtctcttgctcttctgagttcattgggttgttatcaagatgggtttgcaaaagatgaaattaatgacaaaaaagttgccatgcatatgtatgagcatacaacaatgatgaacattggtaatgttacagaatatggtattgatttagtttgtaatcaaaccacagttccagtccagttattatttgggttgaaagaacaaaatcaaaagaagataaattcacatcgttgggcttttgaaggatttgcagagttgttgcaaccaaatgtggtcgtactcttagatgctggtactatgccaggaaaagactcaatttatgaattatggaaagaatttaagaatccaagcgtaggaggtgcatgtggtgaaatcaaaactgatctaggaaagagctttgctaaattattaaatccacttgttgcagctcaaaattttgaatataagatgtctaatattttggataaaacaacagaatcaaattttggtttcattactgtcttgcctggagcattttcagcttataggttagcagctgttcgcggtactccattagagaaatatttttatggtgaaggtctagaagataaaggattcaattttttttcttccaatatgtatctagcagaagatagaatactttgttttgaaattgtcactaagaagcatagtaattggattctacagtattctaggagttcgtatgcatctacagatgtccctgaaagagttccagaatttattttacaaagaagaaggtggttaaatggttcattctttgctgccgtgtattcattttgtcatattcataggatatggactagtggtcacaatgtaattaggaaaatatggtttacaattgaatttttatatttgtttttcaatacactaatatcctggttttcgttaagttctttcttccttgttttcagaattttatcattatctattgctacaacataccgtacagtgtttggaatactgtcagtaatatttttgtggttatatggtgtttctattttttccacttttgttttgtcgttaggcaataaaccaaagagtaccgagagatattacgtaatgaattttcttttctttgcggtgttaatggcctatatggtgttttgttctttgtatatgagtgttaaatcttttgaagatattttacaagatacaaaaattactttcattggattaattacaaaaacagcttttagagacttagttatatccatgggttccacatatgcattatacttggtatcttcaataatttatttacaaccatggcacatgttaacaagttttatccaatatattcttttgagtccagcttatattaatattttgaatatatatgccttttgcaatgtccatgacttatcttggggtactaagggagctgtagcaaaaccactaggtaaaatcaattctaaagaagacgggacttttaagatggaaatattggtttctcaggaggagattacagcaaactacaacaagtttaaggccatattagatgctcctgctgaagaaaaggttgacgatggtctttcttatgaagagaaaaaaacaggttattacgctaatgtcagatcattggttattatattttgggttatgacaaactttggtattgttgcagctgtgttggaaactggtgggattagtgattatatgactttgaaacggcaacaacaacaagcaacagagaatgtaaccgctcatccaattatttcagaacgtacgtctatatattttagtgttattctttggttggttgcattctcagcattggtaaggttcataggttgtaccttctacatggtaacaagactatttaagaggttatttagaagacattaagcaaattgttaaaacaacgagcttatcatattattccaaatgatcacaaattaagataagaatacataactaaaatgttactactaggtttgttaatagcatataataatttgatggatattggtattattaattagtaagtgtatataaagtttctttgtttagccgttcattggtatagaaaatctaatctttttggcatataacttttagtgtggactcattttgtgtttttaccacagtttaatattgaaccttgcacattacaaaagaagggggggttgataattgtgaaattctttcattttgtgaagtggagggattaattttgataagtaaatgcgaaaatatctttcgcatttcaatgttagtatttttctaacggaatctttaagttccgcatagaagtttattaaaactgcgtatacaaagagcggcatgcatgtttttcctccaggtcttttttagtttccctcattgttacacgaatgcggattaaatcctgcattttgctgtatggtataatttttttttttttttgggaaagtttaatcgaatctgtgggtgatggaatacaaaactgtgaattacaaggtgtctgaatattttttttattctacactctatttttatttagaatagctaaacctgcatctgtttctataagactatgttggtttacatacaatagatagaagatatatattgttgattttactctattgaaagaggggaacattcttaagactagagatatcatatataacataataattcacatagaacacaactacaagactattatttttagttagctattcaatttcatattctttgaaaccctttgcattgaacaaatactaaaagaaccaaacaagttttttttttgtttcaaaaagctaattacattttacattatctgaatttttattaataagaaaaaaagagcttaaagcaaccagactgtcggtcatccaatgtgtagatttttaatatttaaaggaaaagagcccatcaaattgtcacatcttttgactaggccagcacactccattataaaccaatcgtttgattctagacttcggttggatcgccggaggccaatgaacggtgatgggtttggtgttgcatactacccaactgatcaagagttgtttcctgatggaccatgcttatttaaggctattacaccagcatggaataatcaaaatttggaaacattggcagagaagactaagtcatctttagtctttgctcatgttcgggcttccacatatggtgtcttagctgagactaattgtcatccatttacatatcataatatttgcttcatgcataatggtggaattgcaagttttgacaaaatcaagaggaaattaataaaccatatagatgatacatatttaaatgtgttgcagggaagcacagattcagagtgtgcatttgcattatttttagatactttgcataaaatgggttatgatccatctctcaagagtggagattttgggcatgaggcgttacgagaggctcttttgaagacaatcaaatatattaaagattggactaaagcagtaactacagagccatctctattaaattttgctgtcacagatggatcgtctgtggttgtatcgaggtacattacatctaagacagatgaagcggcttctttgcatttttcaagtggttccagatttgtggaaactagtccgggtgaatatagaatggaaagactagaccgtaaacaagatgttgtaatggtggcatccgaacctttaacgttcgaaagaggtgactggacagcagttcctactaatagtgttttaacaataaagaaacaaaccatattattgcatccgattatagatgaatattatcaagaggacccattgtatttaagaaattctgcgttggcagaggacaaggggttaatgggtactgtgcctttggctaaatctgttgagaagaatgttccacctttggaaagagaaggtcgtacaaggcagtcaattgcaacagtagcaactcattggatatgaggggaaagaatactaaaaaagaagaaaagatatgtattaacacgagagaaagcacacacatcttttccttaacttgtatttttattttaatggcatctgcattttaccctaaagagatttaaattgacaggtattgtcgatgacttatcttttaatttggtacgaccattgtttaactctacatgtaacaagtcaaccatctatctcattactgttcaatgcttttcaatatggcttactggtgtattatgcggctctgatgttaaaaattttgaatatatatatatatatatatacatatatatatgtatgtatgtatttttgtatttatgtacctacatagaaaagtagagcatgtatcaaccattcataaatctgtggacgaattagatttttaaacactaattttagatccaaagttgaggtttaatcgaattcgctaatcttttggtttttttttttgtattttttagccccttggtaaatgtctattatcgaatcactacaaacgatcacgagtttgcgttattttcatccctaccatcaataggttaaagtatggtaacaaaaagaaaaaaaaaataaaaaaagcaagaagagccagttgtcctcaagtggaaaggatcaattatgacgatatttcagtgttttatagagtagtcccacataattaacacaataggagactctcatgagatcagccatgactgtcctcttctgaaagtaatagtgaactatttttgatgatataagtttacttttcttaacttggccgtttaatatggagaatttttattttgattacagtcacattacccaatatagaacatgtaatacaccgcggtttcctatttgggacatatcctttttgtctcctttgtttatttttatctttatggaaaaatatcaattggaaaatacgactttgaaatttctaaagaaaacagaaaaaagaaaaaaaaaaaagaaagtaaacaaaaaaaaaatttttccagtaaacaaagacgggaagaagacatttatcaattcatttaaatacagttgaatttaattccctccttcaaaagtgttttctctgaacaaacttttaaagttgtggacgatagcctttctctgtttaggtttgttgctgtgggggagcctgtagatctctcttttcttctgtctttctatacctcctctacttttcttgttttttatgagctttttcactttcttatttaatacaaagctttcctaaaggtgtcaagagcattttgaactactttacgtttttccgtcttcctaagtaagcaactttctctttttatttatcctttttttcaaatatagcttcggtgcactataaccattttttcaggacatacttcaatattgtctttgtttagttctaatttaagaatctaacaagttcagaaagaatactccataaacacattagcactaattaggctagcgaacgttttatttccctgtttttttttctatatacacacaacttttaattaagatactacttaatctctaacttttttgtttgtgtttcattttaattttttggctatattattattgtatcacacgtatacgaagcgtaatatataaggcaacaaaaaggaaaaaatgaagttctctactattgctgctgctggtttagttgccacctctgctatggtttctgctaaaccacatgaatttaccaccactttgacttttactggtccaagtactactattgttaccacttctacccacactactcacaagtatggtagatttaacaagacttctaagtctcacaagccaaaggaaaccggtactcacagatatggtagatttaacaagacctccaaatctcataagccaaaggagactggtactcacagatatggtagatttaacaagacctccaaatctcataagccaaaggaaaccggtactcacagatacggtagatttaacaagacctccaagtctcacaagccaaaggaaaccggtactcacagatatggtagatttaacaagacctccaaatctcataagccaaaggagactggtactcacagatatggtagatttaacaagaccaagcaccattctaagacaccaaatgtcaaattggttcaaccaaatgctggttctccaatgactcacggtgactccgtgaaattattaggtctaactgctggtagtgccatggttgctggtgctttccttttgttatgaacgtgaagttcttcgtatacttttttttttgctttaaaagtaaagataagatgaaccttatatgggggagttaactctttaacttatgctattctaatacatccctaatatttcctttcctttattttttttaattgctactttaataataagttggttttggttattactgagatgataaaaatacgaaatcttttttttttcgtatgatttttatttgtatattgttaaatttactattataaagtgtgtgttcttatgaatattttttacagtacatttggtattataatcttgattccctttttagtgttgaacttagaatggttctagtaatgtgtttatgtgtgtttattcaaaattgaaatgttgtgttgtcaacaaagtattgtgaatttagatatatctatgtgtggtgttatttttggtttttttttcttttgtgtgtatgaaggaaggccagggatttaatatcttatagatatctattttgcaagactcttaatgctgtgtaatacaggctggtaatgtgtcgggtcataatatgaattgtgtgtgtgttgatatatgactttgtattagattttactagccaatatacacagtatttgtgaggtattataaactttatacgtaattgtatatagtctttctttttttctaatttaatatataaagtattaatgtgtgttagttttaatttttttataatattatacatttgtaacaggtctatatgagtttcttaattaaatcagtaagcgggaaaatgtgtttatagttaacgttgtaacgttatccaacttttttagtgtaataaaatgcattccagtggctcttagtattaattttatcgtaggcagtgatctttaggaaaagaaacattttatttttgaaattttttaaaggagtaaaaagaaacgaaaagaaaggaaaaaaaattactgaaaatttcataaaaaattaatggaaaaaaaaaaataaaataaaacagagtgatgaagatggaagttgaagaaagtgataagaaattagtattctgtaaaactaacagttggagtaggagatattgtatatcacgataatattggcaattaacttcgtttcatagaaactttttatttctttttttttcatatttgtacaatcctattaactaaaacgctaccaatagttcttgtcgagttataggcatcacacatcttccacgcatacataattttcctattcattttatttagatagacaatgaacggtgacggagaatctagcacaaataagttcgttccagaatatagacgtactaacttcaaaaataaaggtagatttactgctgatgagttacgtcgtagaagagatacacaacaagtcgaattaagaaaggctaaaagagatgaagctttagccaagagaagaaacttcaatactgctgctagtggtatagattctgaagatgaagacgaatctgcccaaagtgctgatcagcaattttataatgaattacaaaaggatttacccactatgattcaacaaattcattcctcagattttcaagaacagttggcagccactgtaaggttcagacaaattttatctagagaacaccgtcctccaattgatgttgttattcaatctggtgtagttccaactttagtcagcttcatgaacgaaaatcagcctgaaatgttacagctagaagctgcttgggccttgactaatattgcatcgggtacttctgatcaaactagggttgtagtagaagccggtgctgttccactattcattcaattattatataatcaatctgttgaggttcaagaacaagctatttgggctttgggtaatgttgctggtgactctactgattatagagattatgttttacagtgtggtgctatggaaccaatcctaggcttatttgcatctccaaaggttactttaattagaactgctacatggactctatctaatctatgtagaggtaagaaaccacaaccagactggtctattgtttctactgcgttaccaactttagctaaattaatttattctttagataatgaaaccttagtagatgcatgttgggctatctcctacttgtcggacggtccagctgatgcaattcaagctgttattgatgttagaattccaaagagattggtagaattattagatcattcatccacattggttcagaccccagcattgagagctgtagggaatattgttactgggaatgatttacaaacccaagtcgttatcaactgcggtgtgcttcctgccttaagaaatttattaagttctccaaaggaatctattcagaaggaggcttgttggactgtgtccaatattactgctggtaacactgaacaaattcaggctgtgattgatgcaaatattgtgccatctttagttaagttgttgaagatggcagactataagactaagaaggaggcatgctgggctatctcaaatgcctcttctggtgggttacaaaaaccagacattatcagatatttagtttctcaagattgtataaaaccattatgtgatctattagagattgccgataataagattatagaagttactttggatgctttagaaaatatcttaaaagttggtgaaagtgataaagaagcccgtggtttaagtgtcaatgaaaatgcagatattattgaaagagcaggtggtatggaaaagattttcaattgtcaacaaaatcaaaacgataagatttatgaaaaagcttacaacattattgaaacatattttggtgaggaagatgatgctattgatgaaagtatggcacctgaaacctctggagccacatttggttttggttccaatgctaatcaacaattcaatttcaattaaagttgtttcattaataagttaagttagttaggttttatctaattataatattctctgattatttaatataataggattcataagaaaggctattctaatcgatgaattttcaacatttcttttgtttctcactcaagagtaaaggaactatcacaatattgaatagtttataaatgtacaatgtcattattgtatgtagattgtgcaaacagctaatatgcatacaaatataaatatatctatatgtatatatactaaatagaattaagtaacgaaataaaaaatgtaccataatgagtatttaacgttatagaatcatgcgtatagtaaaagttttaatatggagctttgctaatacttaatttttatctttcttatagagcagttagaataaatgtgatagtcagattttactattgaaaaatcgaactggtttgaacttatcaacacttttttttgaaacacgaaaaatgaaataagtttataatagttaaaaattgtaacttttagatctggcaggtagttagagacgaagaacaagcaagcaataaacaagtattatcaattgaataattattttttagattgtcaggcttattccaatttcatgaaatttatgaaatatttgtaagtgtaggattttgtcccctttgtaacagagtttgtttctaaatttctactttttttttggttttgattgtgatttgttttcattttgatggaatcatccttgaagttcagaaataattcctatcagagcaataattcgtcttctcagacaagttctaaaatatctaatttgataagcaatgttaatacagatcccacaattacatcaaatagttccactacagtggtcatggagaaggatttaaataaaaacacaagtaaggataaaagtagtggtgaatttgataatgatataacaattaaaccaaggtatttaaattttggagatactattcaacacaatcctctattagaagttcagaaacaaagagagatagattcagataacgatatttcgccagtatttgaatcaccagatactttgaaaagaaatcttttaaatcatgatagcgtaccaggttatattggcggaaataaaaatataaatagtacaaaaatctataatgatattaatgcctcaacaaaattcaaacaaaaacggagcattagtgaattgagaaaacagctaggaacacctgtacctcttccttatttaaataaagatggaagtaaggctattactaaggcatcaaacactatactgaatacacgtccatccgttaaatatgtagctccaattagaaagcaagccattttatctgaaaagtctcatcatggcttagatagaaaatcgtctcctaagcttttgactctagatagattagaagaaaaacagcatattgtaacaaataggtggagagatcttttaataagggataaagctaaagtagaagatagattaaaacaactgaagcttagggaacgagagaatataaataaaaatgactccatccaatctcctaaaaaaatacaacattctatttttgtcaataaggatgatatgccatcaagattgaatgagccttctaatgatatctcaacaattgaaacaaaggtgacaagggaagatcaaaaagaccgtcacggagaagtgggtcacttagtaaatgggtcagatattaatgaaatatcaatattaaaattacaagaagaaatacaaaaaaatgctaataaactagacttaataattttaatgttaaaagggtacgaagaaaaggatgttacatcaatgaatcaaccattacctaaatggaataaatttattacatttagattctcaaaatgtaatcttttgtggacaatttgtattattattttacttctatgtcaaatatatgtgctgaagtatttgtaattatggataattttatgtatatatattgaatattattgaatatatatacatgtatgtatgtatgtgtgtatgtatgtaaatagatagagacatactttttattatgtaatatgtatggtctatgtacgtgtgtgtgctgtaagaataagtttgacttaatagatagatgaacttgtactttttattttttttttgggtttgaaaagtaacatttatttgttaggtatcctgataagacgattacagtttcagaacattgcctaatattatactggaagttccgtgaactagccatttaagaaacttaagggtgtaaaaataaaaattagtgttagttacttgatctcaatgtatgaatgtttacaattttaattttaaggttgtccactctaccaagtcaacattgtatggatataatgtttctgaggtttggagaagggaagaagtgcaaagagtaaatttacagactatttatccagattataaatggccaaagttagctcaatcactgtacagagatcatgaagatttaataaataagcccgtggcaatccaagatatgaaatggtctcatgatggaacttcaatcatcacaataagcaatgatactgggataagacaatatttgataccagaagaaaacacagatgattcaataggaaatgagaacagatcagatcttagtttgttgactccatttacaagaggattcaaaaataaatctattgtttgtagtgagatacatccattaaattctatgtatgataaggattacaattttgttttattaagttcaagagatatgccaattcaaatgtatgatttgaatatacaggatgaggaagaagagtatgaaaatataagtttgttatctaagagacattcaaatgtcagatatagctataatatagtgaatccaatgaatgaaaaatttgagtccccattttctattaagatatatccacatcaatacgacagattttatacaggtgggcttaataatataatcaaaatatatgattttaatagaagtttgccgatctgcgagtattcagtaagtagaagaaatagtaatagatcgataatatcatgttttgaagagaggtcgaataactatatgatagataataaagttgtattatgggcaagttataagaatgaatttggccgattagataccagatgtgcaaaaggatattcgaaaaatatatatgaagctaagtaccggctaccacaaaacttaggaaatggaatatatcaaatgattcgtagtgataatggtcattatttgtatatttttttgaggaaaagtgataaaattcaaatatttgatatgagaaatatggaaagtaagtctattaatgaattgaaattaccctttaaaattggatatcagaagatactagcttcgatggtggaaggccaagggttgatgttaggctctagtcaaaatatattattagtatgggataaagcattggttgagtcgggtggtataaccaatagggaacaagtgaaagacaactatggttttcatgcaatatcaattgacaatctacacagttcgacaaatggagccagaataaatattataacacagaacccaaactggatcaattcagataatggttgtattgccatttcgagtagttttgatagaaattgcaccattgatgcaacagccactacgaaactacaatcttcattatacgtcctgggactaaattaagaagctcaatcacgctccattgcagttgtaatagcagtgctgggggtatattattgtttattatatttacatgttgcacaagcttctccatattcgccttgcggattcagtaaacaaggaaaattgaacccccgcggaaaatgcaaatcaacaaggaattttcgaattttttattttattttattttctttttccaaacgcataaaaaagaaaagagaagaaactttctgcaggaattttcctaaaatggaaaaataataacaaacacaaaaatgatgacaagaaaattcgaaggcacaaagaaaaaagaaaagaaaagaaaagaaaccacaaaattttctaaataagaaaagttaaaaaaaaaaatttttttcttaagaaaaaggaaaaaaagaaaaaaaaaattgaagagatgatcgaacgaaaaacccagtaaaatagagttgaagaactacgaatgtgacacggaattcagagatatagccaattaatagtacatcgtaagtagtttcattgagtaagagtttgtgcttagtatatatagtttttcaatatataatttataatacagtaaataaataagaattaagtaaagctaccaaaagtatcaatcatatcattcgaataggaaagcaaaaaaaaatataaagatcttttttttctttttttcttttttcttttctattcacttttctagaatgacaactaatgataatattaagccgttagtcgataggatattgatgaacccgttacaatttattcaagtagcaaatgatactgatacaaataaaggaagtggtgtaagttctgaaactattaagaatacttcatatatagtaatcggtaaagggaagtctaacgggatcgaaaataataacgtggatcaaaaagccgataatattaaggtccattcagaaaataatgttgtcaaagaatctgaaaagattgtaaaacctaaatctatggcagaggcattagctatgtataataaatcagataaaaagactaataagaaaagagcaggaaagaaattgtctttgactcaagatgattatgacaataatttagatgataacaatgataacgcggggaataatgtccagaattgtgaacctgattctaataacttcagtgaagttgtcattaaaaaagacgcaaatcagttaaatatggaaaagaataatgaggataaagaaatagaagaaagcgatgaggatgatatggattatcaagatgaggaaacagattccgatgatttttcagattcggattctatgtcatcaaatgattcaatcgataagcctatgtcccacacacaacacaataatatgatggaagaagatgttggggaagatgtaggagaagcacttgaaataattagaaaggaaaccacagtggggaaaggtgtaaatagtaatattagtgaagatgatgaagacagtaatggaaatgatagtgatgatagcaataatgaagaagtagaagaggagaaacaggaggacaagaacgagaaaataaatagaaatgataaagtattggagtctgaaagaattggttttttggaagaatccattgtctatgaaattgaaaaagaaaagagaaaagagaataacccatgtgacgctgctatacagaaatataatgaaaatattactttcgagaatatgaaacaggatgatgaagatttaaaacataaattgccatttaataaaagagaggaggtggctaaatcaaatgctgaattggaaggtttttaccaatttaatgagaatattgctgatgaaggttctatattgccatctaaaataatcaaaaattggggtgctgaaatgtctgccttaaaaccccgcggattactgaatcatggagtaacatgttatacaaatgctgcagttcaggctatgttacatatcccttctgttcagcattatttatgggatgtattacgtgggaagtatgtcgacatcattaaacccacttcagttacaatgaccttggctgagacaagtaaaaaaatgtggtttcctaatgacaaattgaagaaaaaattgtcttcatacattaatccaaataaattgattaatagattagaggatatcaattgtatgatgagtgaatggcaacaagaagattctcatgaatatttcatgtctctgatgtcaagattacaggaagattcggttcctaagggccataaaatgacagaatctgttgtttatgatatttttggaggtttgctaaagcaattagttacatgtaagtcttgtggtggtatatctaagactgaacagccattttatgatctttcattacatttgaaggggaaaaagagtggtataaatgaaaatacatcatcaaacacttctataaatgatgattccatagtttctctagtagatagtaagacgaatttagtaaatgataaatctaatgatataaaagatgaaaatgtttctggttcaatttcaggtaatgataaggacatagacattagaaaacatacagataatactaatcaatcgcaaccaagcataagtagaaagttttctattgaaaaatcaattagagatttttttagtccagagttgatcaaagtcgataatgaacaaaagggatatgtttgtgaaaagtgtcatagaactacaaatgctgttaaacgtaactctattcttcgggcaccagaaactttattagtgcatttgaaaaagttcagatttaatggtacatcatcatctaagatgaaacaggcagtttcgtatccaatgtttttagatttaacagaatattgtgacaaagaatctattcctgctggtaaaaagcaattgcctctcaaatatcaattaataagtgtcgtagtacatgaaggtcgttccttgtcgtctggtcattatattactcactgtaagcaaccagatggttcatgggccacatatgacgatgaatacattaacaaaatcactgaaagagatgttttgagagagccaaatgcatactacttgatttataccagattaacgcccaagagtataaaattaaaagataccttaccaaaagagaaaattgctggtttaccgtacattaaaagtaaaaataataagaatggcaatactgataaattcagaggtcaaaataataacaaaaattctactaatatgaattcaaacatattgtccttagctaataataacaaaggccgtaagaagtggaagaaaaataaaaaacgtaagttaaacaaataagcatacttattttgtttattgtttcttttaaataaataatatagatataagcatcacatacgcatttagatatatatatatatatataatagaaatatcatacattaaatatatagttaagagaatagacaaatcacaaagtaacaaaaaaggatcttgaattcgtggataacttaaatcttacatagctggattatttacagatttgaatatttatatttgatcagagtgaataagtataatttctaaataccattttaagagaagctacaaatagtatcttttttcctttttatggtactactttaattcccatgctcttggccacaccaataattgatttaacaataccttccatcctaagaagagcatgtctctcatcagtttttttaattaacgcaatttcataaacatgctttaatgataattcacctattgtaccctcctttttgtttatattcggttgattggcacctttttctttgcctaatgctcttaatagaagaaacccagttggcggtgattttaattcaaaagtgtatgttctatctggctttactgtaattaatacaggtattgggatacctggtttatacatggctgttttggcgttgaattctttacaaaaatcaatggctttgatacctttggaacctaatgcagggcccacaggaggagttggggcggcctgccctgcagcaacaattaatttgataagagaatttttggcctgttgtgacattatgagttctaatgcagtattactagttagtggaatgtcacctgagcttgttatttgactgctataatgcaaaacctcaaaaaaaaatactcatcttttcttttgaaaactaaatagttatcatgtcatttgaattttttcttttttagatttttcaaaatcttctttttccttatttaagttggtatagaaaaattatgtatgtatatatatgtataaataaaggatgaaaaaaatgttgcagggacgatagaaatatttcaatgtattaatggagaatttttatggaagagatgggaatgtaggaacctttacttataatgttacagtctattctctatcgtcctagcagcagcaataaaggcaatagtaacaatgcataagaacaggagtaaataagtagggaaagaatgtgtgatacgacaaaaagtgtctgaaagtaaaacaaaatctattgttgaagttatgatgagagtatttacttatttaatatcaggtatgttcactatcgtagctctatatttaattaagaaaataagtagtcagtaaacaattattcttctgaatctgcttgctcattgtgtctttgtttctctttctttttcttttctaagccagctatatgggcttcactttgatctacctgcgtatgtgtatgatcttcagcagagacaactttgaaatcaaacctgtcttctacaacatgacacatttcaatactcttaatccatggatcatccatgatttcttctatgttacttctacaagctggcgccaaatctaccatcctaccaataatatgttgagcttcttcaggtaaggaatgaagcaacctttgtggaccaatattaggattgcttgggtctgctgcattatgtgcagaatgtgtttgtgcaccattgttaccagtagtactgtagccctcataacttgaatgatctaaagtgtcatacgatggaggttccggagttcttatcattaaagcactcaatgaatcacaatttctgccggaacagaataatttaaatgaattgtctcttaatttaggaattttccatgggaatttctttagaatcatacaacaaaatataattgctgcggaccatatgtcaacaggacgtggatcatatttagcaaagacacagacctctggtgctaaatatgggtcactccctacaatcccacttgcttctactagggttttagagaaaggatatgaaaatactacagcagcaccaaaatcaattagtttaataatacctttactgttaataacgcaattatccaatttcaaatcacggtgtgctaaaccaatactatgtaagtactgtactccagttaagatttgcttaaaacaacagcaaatttcttcatatgacattttattactcatgacaatcgcaaataaatcatattcacaatattccatgacttgtaaaattcgattgttttcataaacaatttcaatggtttcaatgatatttggatgatgtaaagtggtaccaatacaatactcagatgttatttttttaacgtaatcacgtttagattcattctctaatttatttctaaattctttcactgcaaagattctattatctgatactctttttacaagttttacagaaccgcctgcacctgcacctaaatcttccccagtactaatataccttttagagaatggtaaacttgtatcatgtgtggtagaataaatagtatcattagaataactggagccaaatgatccaggtgtaaaatttattgaagaggtattattattactattatgtataataccagtattcacattcatatgattatttgtgggatttagatgagaggttgatgttggaggactattcattgaagtagagttattttttttaaaaaagccgcgaaagtttgccattgaggaagaacgatgtgatttaaccgtactttgatttggaatgttggtattataagtattattatgattatttagaatattttcatgaatagaatttggagacccatataaattttctgtatatgatgaatttgccggttgtcttgatgtcgaataaatattactatgtttagcacgggatggtttaggtatagctgttgcattggttgtagctgtagtggcaacattgtttggatttgtcgtagctatgtttgtagtagcgtttttagtggatacatttatagatgcagtagaggtagatgatgaagatgatgaatagtttgacgctgatgtttgtaaaacatgtgtttgagatagatgactagttgaatgagtagtatggttatggttatgattgtttttagaagagaaaaataaattacctaaggatgaagaaaaggaacttgaacgggaaacagtaccaggattattatgatgatgattgttattataactactatcatagctttgagtgttagtattgttattattatccattactgctctttgaaatttttgttttgatataataaatcttggttcaacagtatctacttttggtgaagttataatatttgaatcaatggcagaaacattattgggcaaattggcagcaaatgattctaaaaaagacgaagtatatgaagatgcattactatttgtgccattagaatgtgtgtctttattagaattaggtacagaatatggaatacttgaagatagtgaagggatgggtcttgactggttcaagttactacatgaatttttaaaactgtttcttctaagagaagaacttgtgttataagaattatcaatgaaggaaccaaatctatcttttaaggagctattagtaccaacaaaggatgcagtatgggcaaaatttgcagttaaaaaactttgagaaatctgaggatcatttctggaatgttttaaaatactcggatggtggtgtaaattatttattagatgactattaggtttaacctcatggtccattgtaggttcattggaaaaagagggcttacctagcgtctttgtggtaataacagttgaatccatatctctattaaactcgccaatactcaatctttgtaagtcactgttgatgtcattgtgtgagtctttactcttgtcttcctgttcattttctaagactaattggctcaccatagtaacactagttgtaggaacatttgtttttctgataccatgtgaaatatctaaagttcttgaagtagtatgtaagattgggtcatccttagatacatatttataaccagtttttaaattattgttgctgttattatcattattattatccgtggagactatatttgatggctcaccttgtttctccttgagtaatctagttaaagaagacatagctgtctgaatggatagctaaatgatatggaggagttaagttttgaaagataaatatgtatattcaaaattaacaattgtaaagactttgttttaaatgagagcagaaaataattttatagattcttttttcctgtccttgtttctcttttttatcaaagtaatgttagctcaagtgattattagtcaacactttttttggcatttaattttcttcccttatcggattgagcaaaaaattcaaaagggaaaaaaaaaagaacaagtgaataataaacagagtaagggaatgataaaatgaattgagacgaaatgtgaaacaattaggaatatattgcagagattattcacaatcaaaagatagtttgtcaagtgaagataatactatatatgtaggtatgattgtatgtattatcaacaatgacaattggcatgtttaaattaatatttgtagataagataataataaaataagagaatattagataaaaataatgactatgagaataatatgggtaacacgcaattcgaggtcctaacatttatatattcaagttggtgtgttagacaaaatataagtgtaactgtaccatacacaagtcctagcatatacatatgtcgaaatatatatatagatatagatatagatgtacatatatacatatataaatttttatgtccgattatttggctcctagtacttatatttgttataattagttcagaagattgagattgatactctaatagtgttttgtcagtcttccttcatttagattttaattttgtatccttcacttccactataatttccttatcttatcttatcttatcttattgaatttttttatttttttatttttttttctttttcaatcttccatttctttcgttttgttgacgtagcatatgaaaatatgacataatatgataatccaaatgacaaataaaaaaaaattaaataatacataactatcttattcgactctatatttatatatgtatgtatatgtatttcataatatactctatttgctgtgttgatttaatagttgttggtgatcttcgtacaatttctcatgaagttgtcttaattcaacatatgcatcagtcaaggtcttaatttgttcttttaattgcgagacttggtcagtacttgtctccttgtttttaccaacatcagtatttatagtcatactagtattattattattaccatttgaagtagcaaaaattgtttcttgttcagataatttagtcatatatcccctcaaatcagataatgggttgataatgtagtcttgtctttcatttatttcttctccaatttgataccatacatcatggtaatcatctaactggctcttgtcgtatatagatctttgtaaatttggaatcttctgaattgagttactattattgtgatgatgaccattattagtattattaccgttgctattatttgtagaacctgcaatatccaatttatctctagaatctgtagtatagcaatatgttattatattagtgacgtttccatgtgcatcgtgtgatgtactcagaggttgtaaagtcttcaaaatttgtctagaatgtatctctgtaacaaatactttacctaatttatcgcccaccaacaatatggtaccatccatattgatctttagagcactaacgtcacaatccaataatttggttataaccaattgacccatattatataaagaatttttttcatcttcgattttatgggtatcagttaccgttgttgaatcagttaatgaatatagtttccctttattacaagcttgtaaaagatttattatttgattcctatttaattggtagtataacgacaatgcaaaacaacccacttttgtaccaaaataacatactctgtctgctggatctagtgaaagggtctctataccatgggaaaatgtgaaagtggccagcaaagtaggggttatcatctgatcatatgcagaagtcatagaaatggaagatccattgtttatttttttacctatcccaatacttgggtctacttctaaactatagcatctaattgtaccatcttctgaggtagtaaataatttgataccagatgtaatcaaattctcacccgttgcattactcacttggaaatcagtgacaggcaaagtatgatcatgaataattgatattggttttgcatcttccattgtaattaaatcactagtttgccatattataacacgagaatctttaccactagtaatgacatatttcccatttagaattgattggatcttggtgattctttgataatgggccataggtttcacatttaatagtaacccagaatttaattcccagatatataatctcccagattcggtagatgctagtaataaatatggcaaattgaagggtgctaacttatgacttacgtttccggaagaaccatgtaaagtgttgttatcgactacttctaaacaattaactgcctcagggataggtaatctttgttccacggattctctcttatggccaccagatatattataaacattaattaatgcctttttggcctgtgcaataaacaaataacgagtccccacaataacaccactatgtttggaattcacactacattgtcttaaactgttttgttcaaaagagtgaatattggcaatagaacctgttgtatgtgtagtgaagattaattgctcgtccataccttgtttcaatttttatttttttttttaactatattgtcaagtttccttttcaagatagtaatttgttcgataccaaatatatttaaaaaagctgatattttttttttgatatcagacttctcgctgcgttttcttttcctcagtcttgtaaactacaagcaatcatattagcatcagttatttcagagaatattatatggaatcttcttcaatataagttattcatctttttttgtttttttcgtttcggcctcatcgcaaatctcaaaaatctgttaaaaaggaaaatttttttctttcttttttttttccgttctccaaaaaataagtatgaaatcatttttcacaacccaaaaggagccagaaaattggcaatgattctttatctactttgaaagttcgtacctaatgatagaagactaatggtttttttcttttgcctttattttcaattgcacatttctcgtatttgggtctttctgaaagctttcttaaaatatatagtaaaatttaaaaaaacattgtgagaacaatttaaaaataaactatattacttcgagaaagaaagaaaaatagtaagaaaatggttgtatttaatggtgtatttgttgtactggaaattcaaaagtttttttggattctagatgtggtgattttatgtctttatcatatttttctatgtttggtttgtatttaaatgatagtggatcttgttttgaagtaaacgaagatatcaaatcataaacattgaaaaatctaaccttgtgattttgagtcttttaatactctatatgattttttggagtttcttttttaatttagaagtcaaaactcggaagtttaatgccatttttttgagtaaacattgatattaactaaattcagattttcctttttagccatttaagtattgtgggtcccataatatatatatattatgggccaatgaaaaatgggattatctagtagtgaatgcctttttatttctttttatacatacataagattatgaagttgatatttataagaaggaaaaaaaaaccaatgaaaattaatttataacaattcacaatacttttgcttagcttttattatatttacccaaaattttgtcaattgaagagaaaaaataattcctctctatttattctttataaatctcttgtaagttgtaatctacccacacttggagcattaaagaaagctaaaatgttattgtttatgccttagagagaagaacttgtaccgcatacttactcaataagacaataaattacaaaaaatttgaaaatcagacatcgtgatgataaattagtgagagatatgttatttttagaataagcgtaaaatatcacaaactacaatgaaggttggaaaaaagaacaagaaaatatatgaagaagatggttatttctaatttaatgaaaatataagggataatagtaattcagtacacccaaattgtgataatgttaatgatgaaaaaataaataatatgatcacacttttaaatgaatatatagttttatttcaataacttagtaaatatggcaacatctacaaagtattgctttgggaaatacaagagaagtagtttatttagagaatttttttaaacaaaagaaaaacaaaacagaagggttataggttgttttaaagcttttcaaaatatgtgtaatagatgattacagcataaatatccctttacataatttaacaactatattctttgtttgaatttgttttcaataccgtatccaatataaaattgtaaaaactagcatctaatgctatatttattatattaaaattattattagttttatatgttattagtttgtaaagctttctttgtaataaaaagttgatcatttgtattagaaagttctttgtagtttatttgtttgtttgtttgtttaaatattgctttccccattaaatgatctatctctttttaaaaaaaaattaattacaaaaaaattgttgcaattttctgacacttgtcattttccaatttgaataaattgaaaaataagattgaaaaatgagattggaaatgaatcaataaaagattatgaatagacacatcatgatattctaatgaaaattttgactgatttcaatttcaacaaaacctaattgttcatgaatagaagtatatcatattccttctccttacctctctaactgctatagtcaaagttatcatatttgatattaaattttacaccatttatcttttaatagaaatagttcatatacattagttcttttataaaatgccattaaatattattggaacagctatacttgaaggtacagataaaattccatactataaagaaatcaaatatattacaccgtatgttttagcggtggctgggatcaaatggtggtttcgtggtgtaaccaatacttgggaacgtaatttacacggtaaagtttacattgtgacaggggcaacatcacaatgcatggggacttcagtcgtctatgaaatggcccgtttgggtgcacagttgataattttaacccgtaagctagatgaatggtctacagaatggatagaagatttaagggaaagaacaggtaatgaattgctatatatggaacaatgtgatttaagtgatttatatgagataagaaagtttgctactaaatggttggataattctccaccaagaagattagacggtgttatcgtgatgtccggagatatggaaccatggggaattccaagatattcttcacctgtaagaaaatcatcaatggatggattagagttgcaaatggctgttaataatgttggtattttccatcttttaaatcttttacaaccaagttttaaagcacaaccaccagatagagatgtacggattattgttactacatgttggctacaagccttaggggatattaatgtagaagatcccttatggcaaaacgttaagtataaaagtgctttgaaattttttgcaagtagtaaattacaaatgagtcttagcatgttagaattacaaaggagattattacaaagaaagacaaaagagaaagatgtggaagtatcaggcaaaaatgtcaaggtgatactggttcagccgggtactatgagatcacccagtctccgtcgtcttataagtaatggctctgtcttattactaattggattgtactgtattcttctttatccatttctttggttgtttataaaaagtggtaataggggtgcccaaagtattctttatgctttgaatacaccagaattagaggcaagcaatttgaaggacacaaaagccaaatatgtaactggttgtagtttagtcaattttgcaagaaaggaattttctgatgatgaattacaaaagcaactatttgataatactgaaagagatatatacgctcttgagaagatcatggcgattaaaagaaaacaaaagagtgcatccagatccaataaaataaataaggagggaaagaaatgaaatctgcgaacagttattggatatcttttatatgctacattttctctaaactaacttttttttttggaccctttgatatccatatgcacaaaaacatacatatacatatatatagtatgacatatttagcattacatagctcctataaatgttatcctaggctaccagtcctttgttattcataaaatctcatttaatataagaataaaaattattcttaaatgaatctttttttttttttgttaaaatgcattacttttccaaatccattaaatattattacattatgacgcaaaatgatttcttccctctttttttagcagagtttgatttgaaggataaagtgatattattctttttgtttttgctttttagagcttgattagtagtgtcagtggtgcttttagtccgtttgaagttgctctctacagcagatggtttgattgatgcactttgttttgtagaaatatcagaagatggttgtgttggtcctatctcaatttcagacgttgtcttattatgcatgattttctcctctgattgtttggcagctgtgtcgtttacttctgcattcatttgttttctataggtagggtcatattcatagactaacttctggactgcggtttggaagatttccgccactcctgtttgatattttgcagaacattcgacataacctaacaaattatgttcatctacgaagttattaatttgttctacggggacacagttttcatcatctatttcttctcttaaatctgattttgtaccgattagcaaaatagggtatttattgaattgtttgaacaatgaattattcttaatatttgcatgttgtcttagttctgggaaccatttatcatttatgtttttaaaactggtaaactcattaactgaaaaacataaaagaaagatatctgtttgtggatatgataaaggtcttaatttatcatattcttcctgaccagcggtatcccacaaatttaatttaaataaatgtagtttatctgtagaagatttttgctcgttaataaaggacggcacttcttgacttgtcccatcttttaaatgtgtaagcgtagatgcggggtctacagatatagtgacagaataattatcgaagacagtaggtacatattcagtaggaaaagtatttgtggtatatgaaattagtaatgaagttttacccaccgcaccatctccaaggacaacacatttaagagatctcatgtttcgatgtactatattgtttggttctttaactgatatatgtatatataatgccaattaaaggtaagatactaaatggttttaacacaagtgggaaaatgaatgatgggagggaagagtgacaaggttatttgttttcttagatgatgttaacaacaagtattggcttttaatataagagagggggaatatgcatgtccagtatattaatgcctatgaaggcaagcattgcttaccatcatacagtcaagactgtctaagttgttaaatttatgatggagtgtggtattgctagatcgctcgaaaaaaacaatagtgaagtaacataatatcaataaaaaaaggcatacagacatgcacaaagctcagaatacttggttatgaatcaagaaacaaaataaaagctatttttactaccttcttgatggaaaaatgggataatccggatcaaacaatgttttttttcctctctccttggtaataatcatactattttttaaaaaaaaaaaataaaaaaataaaaaaataaaaaaataaaaaagaaaaagaatcaaaatccagttataattgtgtactataactaagaaaagatattgtagtttctcgtttttttttttatttttatgttcttttgtattcttaattcgttaaaaaaaaaattcagatcggtaaatagaatacccttattatgattgtgtgggtttctattattttgtcccaggaaattacagatcagctccggaaaaactattgttgtaacaataggagcttactatatatattttttattcttgtgatttgtcaatttatttacttttggttataattttgtttcgtgtgggttcagataaaaaaaaactttgttctaggaatttatagggatctgaacttaacatagggaaaaaaagttatctatccagatatttaatgcaaggacttctatgctattggaatttttcagacttattctaaaaaaaaaaaaaaataaataaattatcaggtcttcaataagcaatactttataaaaaataaatagtcatatatttacttctcctgaataatacttatatagatagtaagtatagactattcataatcttaaaagtgaatgattccctagtatgtctttgctaattagtttcatcacttttattgagccatttttatggtataaatggctattctttatttattgttgtattttttacttttactaataatttctacctatatgaatttttgcaacgggttttagagtcctgtatatagaggtattcttcaaaatttactttttgaggataatgtctaaccctatgttggacaaaaaacacttggtaaagaataagaatgaaaaggacaagacaagccagaacaaacaaaaaacaaaaaaaagaggagaaaaaatgaataatttacattctgtaagtccaaataaatgtccggaattaaataatcaatccgtttaatggtgtattgttattaatctattattaataacttttactccctttattatttttttttctttattattgagtaaaaacaaaatctttcaaaagcctcgttttctgaatatcgtaaactttaattccgattttttgtattcggagtgtaaaatatttcttttttttaaatgccgaaatatttttttaatttgtcttgaatatttgctgtaaagttttagtttttacgttttttttctttttttttttgaaaaccctatctcagtacacaagactgttttaatgtcattacatccggacatcctgaataatttgtttttgtcagaagatatttacttcttttaagaaattttcgttcttatttcaaaatttttttttgtattgaaaatttccaaaaaaaaaaaaaaaataagaaaacattaaggaaaatagtcagaaagtgagatagaggaaaaaatgtcgttgctcagtaatcttcactttgtaggaaaaacaaacgtacagtacaacgcatattatcttgtaatatcaaatgttcgttgattttcgctcataaaaaaaaaaaggttaaattaatgattatatattttagatgtcgcctaattgctaatgctttggacatttaattcaaagaaactggcaaaaatagcagatataagcgttacaagatggttgctttaatttctaagaagagaaagttagtcgctgacggtgttttctacgctgaattaaacgaattcttcactagagaattagctgaagaaggttactccggtgttgaagttagagttactccaaccaagactgaagtcattattagagctactagaactcaagatgtcttaggtgaaaacggtagaagaattaacgaattaactcttttagttcaaaagagatttaagtatgctccaggtgctattgtcttatacgctgaaagagtccaagaccgtggtttatctgctgttgctcaagctgaatccatgaaattcaagttattaaacggtttagctatcagaagagctgcttacggtgttgttagatacgttatggaatctggtgctaagggttgtgaagtcgtcgtttctggtaagctaagagctgctagagctaaggctatgaaattctcagatggtttcttaatccactctggtcaaccagtcaatgatttcattgacgttgctactagacacgttttaatgagacaaggtgttctaggtattaaggtcaagattatgagggacccagctaccaacaaggctggtccaaaggccttaccagatgccgtcaccattgttgaaccaaaggatgaagagccaattttggttgcttctgttaatgactacagaccagccgaaactgctgaagaaccagctgttgctgaagccactgcttaaaatgtaactacatattataacaggtattatttgttctacatataaatatttatatatatatataagtacatgaattattatccatattaatatttacttttgatattactattcatgtctatataaatagtgatttctttatttgtgaagtaactcacaggaagtaatagagaatataagtaatgtaatatatatttgttatttacagtcatagaatgtgctactaagaatacagatttgataaaggaattcaccaacggtaagctccacccataactcctctaattggttcattagctaattgaacccatggtttcttcttcccttgttttaattgtttttcgtattctaatctctttaaagtgatttgtttactctttaatatacatttgacatggatatatctgtgttttataatacccatacgaccacgacctttgatgtctatacgtttcatccaagcaccatcacttccggtccatatttcagcaatatataggtcattggcatccaaacctaaagttttggcatcttcaatgccacgttcaagcaaatcaccaacttcttttcctaaagctttcttactaaaatgacattgcgtgatacccttcttcaaatccataccttgaaacatccttaagaattttgttgtttttttcatagtagatttaattctgtatgactgtaaatagatagaaggttctagagcctcaatttcttcacgagtcaaatgcaatttgtatttttcattagtttcaggtaatttaacaatagtgtctctcctatagaacccaccattcttacgacaatttaattcatagatttgtctttttaaaggagatagtaaaatatccttggcaggcctttcataaggtctctgagatttaataaaatcttgtaactgtttatcacgttcaggtgttaaagtcttttttaatgtgttttctgtttcctcgccttcgtcttccatagacatttctaatctatcactaatattgtccaaaactctatccccagtaggtttgtccttgtcaacggtattggaaataagagatccgaataaggatccttcattattgattcgagcagatgtctgaaatagtcttgaagtaactacttttctcgatatttgatttatgtatctagggatcatcatgactgtatagttattctactagttctgttacaatttgtcagcatacttgaatatgacataaataatgctttttactatactaaatgtcctttaaaccattttattccatttctctccatttattttttgttcttttgaatgaggaaaaaaaaatgaagaagcataaggagaaaatagaaaataaagatgtacgttctaattaaaatttattatactgacagaggtttcaaaaaaatagaaagaatatatatagagaaaacacagaatcagtgcaaagcttctataaaataacataatatatacaatctatataggtgagatgtttgaatgtaataaataaactacaacatttccctcaaaaatccttgtttattattgctcattgttccatatctgtctggtgatgatgacgttatagaatagctgccaactgcagaagaattgaatgaagaatcagtatctgaagaaacataggagaatcttaaatgataattatcgctatcattattatttggtgttaaaggtacactaagagtccctatgttattgaagtctttattgtttgaatttttattctttcttggcgcaggcactggtggtgttctattgatattatatctcctgtcaaactcgaattcatgtttaaatggatcactagatacattgttggtggagttataatctactctatatccccttgaatgtgtgaaagattgcgatgaagacacagaattattaaccatactctcacttttttggctattacttaaacttaatttattcttccaattcttacaatatttcttacgtttaaatacaacaaaccagataattgtagaacataggatgacaccaactacagcaccaaccacgcttcctgcaatagtcccattatttgttcctgcactgttgttagtattatcattgttttcagtatccgttgaatctaaccctccaccatttatccatttattatatacttccactggagctgttataactgcagttgtggataaagaatattgagaggcagtatctgatgaagataatgttagtgtaattggtatatttttagtgaatgacgtggttttaccagtaaaataatactcttgcgtgtatattatagtgttttggtatgatgatacaaatgaagatgaagtggataagttataggagatagaagtagatttggtgtcagtagttgtaagggaagatttactactgaaagaaatagaagatgatgtttctttaattgattttagtgttggtgtcttacctaacgaatatgtagcagtcgtattcttaaaacttttaattaaggttttgttgatagatgttgactgtgatatatgtgaagggtaagaaaaatattggcttgtcatcgagtgttgagtaaatgatggtgtataagtgagcaggtccttcggtgatgcaatagtggtgttggatttgcttgtggaagacgttatggagtgaaaagttgttgactgagaagctattgaaacttcgctgagtggccaaagaggattttgaagaggtgagctgaatcttgattgctgttggggtctggatgtagtatcataatgtgtcagaaaagatgatattacagtttttatggagaccgagttaggaatatttgttgactgatcttgtgaatatattggaaatgtagaggaagaagtagtaataggtattatgctggatgaaggcattcctaagttgatggaattatcagaactaattgcagagactaatggggaatgagaagttgatatttcagaagaacgcttgcttgttgctgttgttggaaaagagtatccttgttgggaaaagctcgactgtatggattgaacgcttgagatgatgggtgaatatacttcgctagaaatagtagaagatattacatcgatgttagagacgaggctagattgttgtgaggtgaatgtggaaataggattgggagatatataagcatgtgaatttactaaggtatcaaataatgaacttgtttcaccaaaaatactcgaacttggtaataatgttgtcgttatatcattttgcaatactgtttttgaataaagcaaaatattagaagtagtcgaggaactaccatataattttatattagtatttgaagaagaatatataataggtgtagaaatagtggtttgattattgatattattttcaatattcatcgtccatgaatttaataattgattggtcacttaaggatatgctagattaatagttcttgtttttgtatatttaatgtaaactgtttgattagaataaataaggtaaagatcacgcccaggtgttcatatggtcgaattaaaaaaaaagaaaaagtaagacaacaaaacttaagaagtcatttaatgcattaaatagcgtcaataaaacagagctaaattggtcaagttgcttaaatgttaccaaaaagtaacaatttcaagatggttgttgcatggaaccaaagacaagtaaacaaggtggggtggtttttcattttgtagataggattttttttttttttgctctctttctctcattcttttcttttgttgcagcaactaaaaataactttgatctctttttctttatgatttccatctccaagattctgttattgtttattttttgtttgtttgttttcttttttgttattgacataaacaaagacatgatgtttctattttaggaaatgtggttgatttatattaaataacagggcagaagacaatagaaacagccttgcaggaggtccgtcaaatttttgctcgacattttttggaagagagtaagttgtattggaatggtaaataccatcgaagataaatgaaaagaagaatcattgatatctgggaaacaatctttgattcattgtgaactggaatataagcatgtaaggattatctcaagtgatatactaaaatatggatattaattatatatgtaaacacttacaaattatataattggttgattctaactagtaaatagattaatcttggatattcgtcttgttcttcttaacctattagatagattatgaatattaatgctgataattatctctggcactatctcttaataatccagggtctcgtaagtaaacttcttaataatttgccatcaatgtccatccgacgatcatatgttcgttcgaatacactcacaatcttgggcccagagtttcggttgttccaagtccttcgcctcgacattaggcgttacttgcagactacgtaattcaggatttccggttagggttccttacagaacacaattacataaaagttattttctttaatattttgtatttttttagacattttcattattttcttaaaaaaaatatctcttcctcatgatcacaaaggatacaaaaactgattcttctccaagaaaaataaacttttttgtgaatcaatatcattgaacattgatgtaaagagtttgtgttttttatatacttcaataatattaaaccatatatacagatcttagatattactttcttattgaaatattttattctaaatagaaacaaatgtttcttctaacaaaaatattcaacaattgtaaactaactcaatagcgaccttataagtgttgttgatcataaaaagtcctttatttaacagcaaaaaataataacaaatttacattctagaatatccaaatgagaatcaataaaaaattttagactttactctcacataataaagactttcacatatacttcaaattgacaaaattcctatattaatcaatactatagttgtcatctttttcacttttttttactatgtttttttctatctatttttttttaaaaactgaataatatacacaagaaagtaaataaaatccaaacactatatatcattcattttgttaacaaaatttgcctttttacatagtcccaatgtttacattctcttcatcctaactataaaaattcaatcaaatttaatttttttaccttgatgtggtactattgctgccgaccctctttgagcactagctaatgcaatactactctttatgcggttatttgatgtataactgaaattattgtttttaggttttttgtatgatattttttcttgaaggcctttttgattatcatcttttttctttaaataatcattactggatgataaatcaaatgaatcctgtgtagtactcttaacagatttatctgattttcttacctgtctcttacttctatcttcaccatattccattctaattggtctcatagctatctttctacatgatttatcagttaaagctttagttgcaccctcgacatttttaaaatcaataaaggcaaaacctttacatttaccagaatcttcaaatgtggccatacgaactctaacgatatcaccacaatgttgaaaatgacttcttaacaaatcttctgtggtagaataggataaattaccaacaaaaaggattcttgatggtggattcttagatgaactaattaaatcatttttatctggcctaccttcataattttcagaattcttaattagtaaatttctaccatttaactgactctctgataatgcaatgcatgattgcatttgtttttcattcttaaagtcaatatagcagaatcctttatttttaatttgtttcccgtcatttttagtcaatggtagtttaattctaacaatatccttttcggatatacgactttcttcagcttctaattctgaagtcttaccgacaagaaacctaatgatttcatcttgagtggtatcaaaagataaattaccaatccaaacaccgtaggttttaattttttctttctttaacttatcatcacttgatccttctgtatttccatctcccctaacttcaccactatcattaccatttgtggacttatgttctgttggtaaagtatcggctttatatttagcattcaactcttctaatgtaattttacctcttcttagtaaacgcttttgttttttagataagggaattgagctctgtaaatctatttcgatttcatcctctgcctttcttttctttgttggatcacttaatgcctttgctatttcattcactgtagttgtttcttttttatcagtatctgtcattatataataggaataaatatttagacttattattcaaatatattatattggagttattgatcttattattatatatttggataaatcaggatcaatttaaattagttttccttttgtgttattatataatgctagatattcaatttttgtttacctcggctgtaaagtaatctcatcgaaaatttttttattattatttttcgtttgaaataaaaaaagacggaaaaaaatatacaattctgaaactaccacttacacaatatataaagaaacacagagcaatgtccagtgaataaaagaaacatattaagatgctgatgatttaaaataggtacgtaccacgtattttgcactttaaaaaaattaataatacgacgttcgaatttactacaatgaatatattaaatacatactagattttaactattagatcaactaaatatacccgttataaagggttaatacattactaaatccattttaggatgtgataccacaaaagatacagttttttgaaaggaaaaaaaatcatttacaagttaacaaaaaaaaaataaaacatacttcgaattaaaaaaacttttttttcaattttctcaatataccagactttttaggtttatctggagcatttactgttggttctgatgatataccaatagacactgttttatgagtagacaaatttttcttagatgatgactcaacattctctttaatctcatctcctgcttgttttaaaagtatttctttattattaacttctttggcatctttatcattctccttattttctatcatgtaagacccttctaataagcccgttccctgatttgtgtaattattcctaccagaggtagaattaacttcttgtgattcccttttaggattttgcataaattcctctttgagaactgatttatctaaaacactagtgttactaacaccatcatatctatcattcacgctctcctcatttaatccggatttctcagtaattttattattgttttctaccatattctcttctgtgttatcggtgtgtccgtcttttaacactacaagaatctcttcttttttctctggtacctcttcctttatactggaaccacctaattccatttctttttgtctttcttcatctttgaaaagtaagggttcttcttgtactcctttattttctgtgatattttctgctatatcttcttttgaatcaccattgttaggcgctacaatactaaatgaacgacctatcgtatctgcatcattaacattttcaatttcatataatctttcctttggttcttctaattcattagagacagggccatttcttacttcttccatagatttataagtagcaatgatgttatcatcctgatccaattcgaaaatttcttgtgctacaattattcgttcgccagttcttttatttttctttatttttcttttaattttaaattttcttctattttcagttggaatatcatcaatatcgtttaaatcttttgaatttgtaataacatctccaggaaccacctgctctcccttatgctcattatcaataatattaccaacttgtttttcttctatgctactataattacctttttctttttcttctgtgctattattatcattattgccatcacctttaaatataaatgcttcaattggttcgttagcaacgacctcattccctgtgtcaatactgtgaactagaacaggaatcggctctctattttcaacaatcgctgtttccagcgttttattctctgttgggaataatgtaactcctgcaagttgtttggcactattatcctgtttatctatgtccttttctcttccatttccgtcaactgatgcttggtttgtttcattatttaatggggatgactcaacttctagttcgttaacaatctcttcgttaattgcttcgcattctgaatattgatgtttttctcttttaaccaactccagttcttctgcttgtttaattagatggaagccagttatatagttattttgattcccatttttatcagtatcgataggatacaagggattacatttccaagtatcagtatcttcaaaataaaatttgaaaatgaattttccttgatcattaaaattctggatgggtaaaagagtctcatatctttgttctttgtaatttggtttcaataagatagattttgtccaattatcgaattcaccagttatgtaaatatgtgcgtcagaaagaaaaacgtaacggtcctgtgcatcaagttgatgcattggccaagtaaaagcaaattgttcagtcatgatgaagggttggatggttaaaaccaaggttaattttcaataaacaagttatccccctttttaattaattaagaattccttaaaataaacaaaacaaacaaacaaataaataaataaactaataaataaacctttgcctatatatatatatacgtaagtgtgaacactagatgataattccgagatatcctatttctctttcgagtgtataattcacgaagaaggctatctttacggccaaagcgaatcaaactgaaccaaaacaaaaaaaaaaaaagacaggagaaaaaaaaggggaagggagaagtaaattgaagtacttttgtccctctttttataccaacacacacacacacacatacatacatacatacatatgcatatatatgtatatgcattttcttttcattattcattatatttttttttctctttaaatcccttttgtcccttgcagtgcgaacaaacaaacagaaaaagaataaaagaaaaaagaaaaaaaaaaggacacgacgtcgtctcacacgatcaaaaagccagccgcatagttgagggaaattaatatgatagcgccttgcgccttgcgtaacatttctcaatcccaaatgcctaaataagaaagttatttcctggtattattggtctacgagagaatttacttttatcaattaacactggcactatatacttcatcagtgtgtgtgagagaatgttcctcttctaaaaatacaaatttctgacgaattgaactgttggtaataaaaaaaaaaagggtgatgcaatcttttgttgtgaagttccttctactctttcctaaaagggaaatggacagtttttcaaaaaaaataaaaacaaaataaataaataagaaaaacctaataacctcctttcgaactttatgtttatttacaactggtaaaggcaaagacgccaattttagctgttctccttttcttttatataatatttgaactagcaaacattcaacatctctaatatattgagtaaaaagagtaaaagatattatacatgaagttgtacatacaaaatacaaggtagttgttttaaatttgtctttttagaatcatttatctaaaaattcgaacaccagaattagtacttaaaataaataaataaatatacttttttacatgttaattattgaatattttttgtgttactttagatacttgtctatttctagtgcggaaagcacactatataaggttttttttcttttttttgttttcaaaattcatttagcggcaaaattttaatcattaacttttttcggtaaagaaaaagaaaaaaaaggtataataacaatgaaaataaaaaaaaacaaaaaaaaactagtactttagccgctgagctccattctcactgattacacacaaagtacaaatacgaatacaaacacacacacgcatatatatatatactccacctttatttgtatctgtttaactctgtatccattattcttgtaaaggtatataaatgttcatgggaacagctccttccccttcaaatagttaaatatcagaagaaaagatatatatatatatatgtaaatcgcattattttgtctctatcagttatttttttcacatatagatttgtactcataccctttctctctctttatttccattttgacttcatattcacattcttttgctttgtatttatataaatttttgtttttatttttttttatttatcatttataaaagcaaaaaaaaaaaaataaatcaaagggtacgaggaaaaaaaaaaagaaaaagatcaaagaagactcttttttaagtcacttcctaaaaattagcaaaaaaaaaaaagagataatacttacttacctatttacatctagtcatatagctatatattaagtacttgttaaacacggaacaatacaaccggtatccatatttattacagaatatagttaatcaaacaaacaaacaaacaaactaacttaactataaattgctttactcacactattattaacagggatcaattagtaagattattacctttttttctctttcttaaaggtatctctcattttgttcaaactaataaaataaatatataacatgaaccacaaaacacaggatgaaatcatcactaatactacttctactatcacagccgcaaccaataaaactcacaacgcaataaaaatatccggtgacagaactgttattgaatggttgatcaatggaaagtgtattagaacatttgttttctccaacaataatatggataaacaaatacaaatagatgaatataatgattttgttttactcaataacaatagtaattatattattaaagctggatttataaacttttatgataaccaagaatgttttgtaataatattatcccactttgcttatatatactatctttcaaaaagtttatcttcacactatgttttcaacaaaaataatctttcttcaacattcagttcaatagatattaaaccatcttttactacaataaatgacagtctgatagtaaattttccatttccaatagataaagcgttttggtattcaaatggcatagtattacaaacattaaataacaacagcttacaatataaatggataacatttaccgatcctatgtctccttttggtaacattcaaatagattctaattttattactgaaaatttgtttaatacttattattataaaaacatttcacctgctgatatgttacatttccctaaaaatgatgattcaaatatcaccgttatcttcgataaaatatcttctcaacttttatttttctatacaaaaatacgaagtagtccaaataatacaagtagtatacattccactggtacaactactataaaccaatcaaataaaagaaaaatgtctttcttaaagaaaagggatgatctattaacagattatcataaaaattcttccaattttaaccaaaatagtgcaccagcaaacaacactgtcaataaaaggaatatatcagcaactattgatagaatgagtagtgggatcaatatgactctttctcatactacagacatctccaaaaatatgactaatagtagtatacacacagataatggtttaccagaggaacttatcggtgatattccaaaccaatcccattttcaaacaaaagatgtcactttggttcaaatatcaaccatagtgataccctccattatcaatccaagttctatgtcattaaaatgtctttctttgttttttgataaaaaagaaatgattttagtatttgaccctatgactaaatatataaaaatatggtgtattaatatgataccagatgttataaactccattcaatttaaaaagtatggtaattcaccacccaatttaataaccttagaagatttaccggtggatgatatatttaccaaaaacacaatttcaaatattataccattagatatcgacatgaatgaaaatataaaatattctgatattatacattctactttaattataaaatttgataataaaagttttatattttataatccattcctaaaggtatattctccattattttcaaaaatgaatacacatgttagcatcattactatgttccctcaatcatctttcatgaaatcaatattcaatgcattaagtctcattatagaacaatcaatgtactacaaattattttatttatggcaatatttatattttaatcaagataataacacagataatatagccgaagaatttcaaatatttacagatattttactggcgttgatatatgcaaaaactgatgattcaaaaattccaacctatattacatctttatcactttttcaagcattagtgcgtaatcacgatattcaggtaattttaccaaaaataataatgggattacatttaattagtgaagaactatatttaaatattcttaataaaaataaaaagataaaattagatgaattcttatctaatgctattcaattaatgaattggccacgtccctggaaactctactataaaagtaaaggccacacggatatttttttacatattaagaataaatttccgtttgctcatcctctagacgaaccaccgtctattatgaaatcgttatatagcataattgaaaatagtcaaataccagtgactccttttataagctttgccagattaatagaaacaaacgactctaccattgaccttctcataactccctgttgtttcaaactattgagcttatacgagtttattcattcctctaaatttaatactatatataataatgaacaacagccttccattatgactatattaaaaaaattaaatatagataaattagaaattgaattgtacccattagccatacacaacttgataaagaaattacttaatgaatatgaaaaaaatattacttctcctaatatgggaattgatttatctttaatcgaaagacctgatattgcaagatcaattagtttagtgggtagaaaaagatacccaagagaaacgagactagattcaaacaaacaacatggtgtaattaatacttctataaatagatatggatcaagcatccattcatcaaaaatatttatatcagcagcacacaacccccccaagttacaaccaacatcctatagcatttaaacataatactgatttcacaaatattactaaacccgatgatatttataacgtagtttcaaaaatagtaaagagaacactatcatctgaaaagctaagaaaaacaaaaacaatctctcaaacttttgcaagaaataataataagattttcttcataaatgacaagaggtttgaaaatgtagaaacaatgctaaacggttccaatattcacaaatttaatttgatcaccactgagagtgactatagtaaaatattactaaaaaaaaaaattatacacccgatttgttgccttacgaactttaatatctggcctaggcagagctgcattatactatgccacggaacaacctctgacatctcaaagatgtattataccagaactgaatctcacaacagtttttcctgacaatactaaaatggtagcacaggttgagaccctcgtcgcaggttcaaacaacaatgaaatgtctgacgaagaattggaaattccaaaaattagttcagaattagctcaatggggcaactttcataatggcgtgtcttatgcattaatgatttcaccaaaaacaaagggtataaatggtagttggattaccttgaataaacctcgaaatcaactgaatgcaacacatggtggctttttattggggatgggcttgaatggccacttaaaaagtcttgaagaatggcatgtgtataattatttaagtcctaaggaaactttcactagtattggtctattattgggaatgagtgcaagctgcaaaggtaccaaaaatttcaaattaataaaagtacttgcagtgcacattgttgcacttcttccaaaaggctcaaatgatttaaacattaatttaaaagttcaaaatgcaggtttagttggtatgggattattgtatttaggacacaaggataaaaaaataaatcaatctttgataggtgaattaaaatcatttgttaaggttggtgaagaatttattgctgatgaaagctatagaatagccgtagggatagctctggggttgaataatttaaatacacataatattgatcctttcgatcagtatgattcagatatagattcaaacaatagcagtctgcatgatatattgtcttttaatgatgagccttataaatcaacgaaaactaatgaatatccatataccaaaactgccttttttagttctaccaatagatctcataccagggttaatgatattaatccaaatagtgcattagtccaagatctactaaaactactaaaccaacattatgacaaagagcccttttggttaccaggaaattcacaaattggtgcggtaattgcattaatatgtatgtttttaaggaccgaaaatgttgacatctcttcccaaataaaattacctattcctacaagagattctacgatatattgtaaacctgaactttacatgtacagagaattctgctatttcatgataaattggagtactatttacgacagtatcgagttcatcatgcatgatatcgatctttctgtaactcacaattatgacttacctcctatttattacataatggcaggtagagtattagctattggaatcaaatatgcatctaccggtgaaattaaagtgagaaattgtttattatctttgcttgatcgttaccttccattttatcaatatgtcaacacgaatatgccagttgttacgatatcaaaaatttacgcaataacaacacttattaatgcattattaatttctgtaagtttggtgatgtgttctactggagatttgatggtgtttcgaagggtaaagtatttacatgaagttattacagggaggtattctgatatatattctttaaataaagataaaaagacaaaatccacatcaaaaaatgaaacaagacaagaaaactcaaaccaatctaataataatgctgatgttcctgaatatgaaacgacaggtattgctaatgatattgatccaattaataatcaatcaagaaattctgataaagaaaaagatcttgacagtcactatggcaaatatatggttacttctatgtgtctaggatttttattccttggatgtggacaatatgctttgaatacatctactatagaatccactgtctatattattatatcaatcttaccttttttgaaaagtccataccacttacaagaacttaaatacttttggagtatgtctgttgaaccaagatgtctttttgtaaaagatgtggttaccgaaaaggtaatagatggagcatccgtagagattaccatgaagaaaagttactcaactgatacaatggttaaaaaatcatacacaccttatttattacctgatataagaaatatcaaaaaattgaaaattgaaatgaaccattattatcctttagagtttgtatttaacaaagagtttcctgcagtagagttttttcaaaataatacaactatatatatgcaaccaaaaggggaaaataacgaaaagatttgcacacctgaagatataaaatttggattaaaaaggagattaaacgatgctgatgaaggaaaaaataagaagtttaattttgcatccactctttataagacattagatatttcagacttgacattgctagagttgcaatcatttctgaataacaatgatattactgattcagaatctgacaagtacgatattgaaatgttatgtactgataaattaagtgggaacattaccaactatcaattacagttatggaagacaacacagaataatttataggattgcatggcaaatttatattcataaaatatgtgtcttcaataggataaactcagtagaatatttatttacatttaataatacttttatatgagtatgtataagcgttaatattactattcatcataataacaacaatacgaaagaaaaaaagaatgatcaaaaatgcagtaattataattaacagtaccaacgaagttcaattaccatctaacgaccccagcttttcacccatcttgattttatccccaacattgacattaaacttgaaattcttcggtgcttcaaagcataaaacaactgtgcttcctaattcaaatccacccatttcttcacctttcgttagtggcataccaccaagaattttactggcgtttaaatatgtagcttcatagcaaatgtgtggatctacattttttgccctctttatattagtgaccaattcttgatcaaatgatagtttaatagaccctacatttgtagcacctactggagtcatactgaaaaacccatgcttccagtaacccagtaatgcaactctttcatttaaaacaaacaggtttgggaaattgcgttggaaataaggtgaaacggagaatagttcacctgggaaatatcttctttttttacaaacccaatcaactggggaatgataatgatgataatcaccaggagataaatatattacagcaaaataaaggtcagtattttttggttcaacgtttgaatagagattgtaatacgggatatttgtagacaattcattaatcaacttcaaagtttttgaacttgaagtatcgaattttgctaaagatttatcaccttcagctttaatactagtaacatttccatcttctttaagggaaatattatatatatctgttctactcccattatttgatccattaataaataaatcgaatttattcttctttgcaaatttttcatgttcagtttcattcgccagaagatttaaacttgattcacttctaaccattgatggatgttcatgagtacctagaaattctttaatagaatatgttaaacctttaacttgttggatttcgcctgtttcagaatctataacacctgcctgtagcacttgaccatcgcttggggacacgattacgtcctcacctggtgcaatcggtcttgtttcaggttttatccttctataaaaaaattctcccaaatttgcatagtgataaagatcaggatcttctatctcatctagattaacattgaacaagaaagtgtaaaatttataaccaattggtctgaaccacatgggcagagtgagattattgaattgtccccataatctagacacagcgttcaacggtaaagttgaataacaaaagaaaagccaattgttattaaatatcttaatatttttattgcgacggctattacttgagacaacatccttctcctctgaatcctgtatatcaattgttatgttaaagttatgtctggatgtgtatatgatagtacctatgaatatagtgacacctgtgaggacagcccacttcaaagaaatttttttatcattttgggtcacatgattaacgatatttcgagcatgtctagtgctagaagatcttttattcggtgcagctttcaatttttgatatatagccatcttggaagaaaatcttcttttccataggaaggaagttgtattacgtaattgtcctcttgacgggatacctaccaggggccgcatctgcaacagacgagctttactctgagataaaacggtgttcataagtatcagaaataatttactaccactactttaataataataataataataataataataataataataataataataataataatgtcaatatactttaatttgtatctttatctttatctttatttttaaccaacagaaagagaaacaaaataaaccactatcaattgaatttatacttcaacctggtgattagatcggtaaattgaatgtgaacttctttttactcactctctgtaagcgcctgattgtatgttttatttactcatttgctcatctatattatttattatttatactattactattattaattttttttccaagtataataaatttccagctaacacaaccttttgagtatttcattcgaagggccaaattgccgttcgagccgttcttgtaggcaaaaattaacaaaacaaaaagaaaaaaaaggaataaaaggaaaaaaacgtgtgttcgatttcgcctcgctgctcttttgccaaaaaatttagaaactgtttatggattaaaacaaagacattgagaattttattcattacaaacaagtgctttgcatacattctacgactttttgtatcctgaaacaacattacatatacatatatatatacgtgtatgtgcgtacgtttgtgtgtgcgtttgtgtgcttatttgctcatataccaaattatacatcaaacagacgatttataaacataatgacccggtttggtctcacaatcaaatttcatgtcaacaatcttctcattcttgtaaaacaactgtccctcgataacatcgcctggcttaatttttcctactcctgcaggtgtacccgtcaaaacaatatcattaggttccaatgacattgtttcactaatagtagacactattttcgccatggaattcaacattaaattagatgtcccgtcttgtctcaactctccattaacaaaacattttaatctaaaactatcttggaaatccttactattcacattaggtaatctatctaatgaaaccatctcactcataggacaaaaagtgtcataaccttttgctatcgaccatggcaaccctgatctttttgcatcggattgaacattcctaccagtcaaatccaaggcaagtgctaccccttggatagattccaaaagatctttggtagaaaatctcaatggattcacattagaaacactggctttcataattaatgccaattcaacttcatgatgtacatccacattctttgggatatagattggtgacggattggtaccatctgcattcaatccatgggatgtagtattactagttccttgttctctctttaccacatttgccttggttggtgtaataatactagatgtaggctttaagaagaaaaaaggatttttgggaattgcattatttaattccttaacgtggtctgcataattacgacctatacaagcaatttttcttgcagattttagatatcgaaatgacatttatattattgttgtcgagatctcacgaaaacaaaataggtaaaaaaaaaagatattaattttactgaaactgattctaaaaaaaggtgatatccccatctttgcggttaaattgatcctttgtaaaaccctcaaaagccatcttacattctttgttttttatttttttacttattctttttccttttcttttttatatatttaacgaataagctctaataatatttcatacacacatatatatatacgacaaagtaaaatgaagaaaagaaattacctacaaataatcacttgcgtgttgattgtctgggtttgtacatagtaaatattatataaatctctactttatatatacacatatataatcattattattattatcatcaccactgtaaataattacatttagtctctttatgtaaaaatataacactattcgcccagagtaacgaagttttatttatttattcatccatatatttattctatgtattaaatgcattcttttccatatacactactatacctgagtgttactgttatcatcattattatttggattagttaatagagatatagatggatttacaggttaagaagtcctgtttacagatgaatcctttgaatctactgctgctgcagacgaagtgttattgtctaacttaagcacactaactccacctcttttataatattctatattttgaactagagattcaatctcatttaaatcatttatagcttcaagcacgtaattttgttccaaatggaatcgtaatcttgacaagagcgaagtcgaatgtctatattcattaaatgaacataatgcatctaggatagatctcatattatcatactctactcgtaaatttttaaaatctttctcaatcttttgaatatattctttcttccgttttctaaacttagaggctgctaatctatttctttctaagaattccctccttttacgttctttttcgtcaagatattcttgacttgtttgtctgttctcattagatgtagattttatactctcattgtttattaatttaacatttttagatctgtgttctgtagaatcttgattttcctcaatggttgacgaattttttctctttcttgatcttgctgtggtttttttagatgtatcacttgtactactgtcccttcttttcttatctgaatcattactattcctactatcagcataatcacttgtttgttcattaatcaaaccgttattattatatttattgtttctgccattgtggttatcatttttattagttaacgtcgtggtcccatccaaagatgcagccgtgtttatttcagttgcaagagataaaggcataccaaaaagacctggagatggagacaaactacttctactattcgacatttttgtataatcattaatggtattactatttagggttcttatactactagaatttggaatacctggagtcatgctacctttataattaattggaaaatttgctgttaacggaatagttgaattaaatgtattattattagcattattcaatctcatagtctggaataatggatacactgaaccaggtgttaaacctgttctcatattagattcattgggggttagtcctgttcttggaatatatgaaaagtaactacttgtattagcattattaggaatgtttacattgttcgtggcattaatatttgtatttgttacatttgtgatagattcgtcagtatttgatggtaaaaaacttggcgataacactagaggtggtaattttttagaaccaccaggagttaaagctcctggtgtttgaatatttggtcttgcaatgggatatataaaagaagatgacacagtaggacctaacatagttggcctattcatcgtaaaattatttgaatttaaagaatcattattagtattattattgttgtcactggtattgacaatataattggaagatgacatgtcgttcgagctattttcatttgagggaactctattatttgaagttagttgtgatattgacaaggttgattgtttttccaataatggaggtggagattgaagagaagaatacggatttacttttctaagtatttgagattgatttgacaattgagaaggttgtgagtgattagtattggattttgaatcatctataattcgtgaattgctattgatatttgcacttgatgcggtagtagaagaagtagaggttactttgccggcttgactaagttttcctgtgtgtgcaaaactttgttcaaaagggttgggttctaaatttaaagatgacattatattagtgctactaaattatttaaatttattcaatggcgacttagattaaatatcagtagagaaaaaagcatgaatgaaaaaggtaatcacaatgcaaaatggagaatatagatacagagaggagatatgatccaattaacaatgattcaatacactgagaccagatagtcttagaaaataaaaatatcagtttacttattgttttattgaaatatatggatatttgtaaatatcgtcacctgattaaagggaataatatgtggacaaatgatctatgacttgatattagactctttcttcccttccaccagtggacacaaagaaagatcgatccaactaatactacttctccaaacttgataggaagtaactatgaataagtatcttgattgctgaaaaatgctaaagttccttccttcttttttctttcaattatttattgaagaaataaaaaattttttttcctttttgtaaaaatacaattactctcgaaaaactcaaacccaaattgtctaacatgtcaaacatatatgtaatttataacatgatgtgtctgatgtctcagatattagttttgagagatggaactagatccagagaaagatgccaaagactaaaaaaaaattgtgaataaaatgttctattaattttacatgatattagctatacagttataataatactctagatctttttcattttttatgacacaacaataactaataatctcagtgttgcaaacaacatatatatatatgtattataaatgtctttattagaaatatgtattgaaataatatggtagtcttgtttctagttagagaagtattttaatacataatcattattttcgaccaatccaaaattcaccgttttccccacgattaatttgtcgtctcaaatttctacttagaagtacaccaatttcataacgttctttggttttacgatctaagtattcttgtaatttattaattgctctatttaattttttaccatcttctaaagtcaatgaaccttgactttccatttgacgtagatatttgatctctttctctaatttgatacatttttccattaaatattcgtgacggttttgtaatttcataatactatcatcggcattagcattgtaattagtatccttttgaaaagacgatgattttctacttgagtgcgatgaatggttgctgcatgtagaatttacccttgaactagatgtagaagtggggctacttacggagataacacggaatggattcgtagtttttctcttttctactgtaacagttgatggactagatttatcttctatattttcgttcttgaacatggtagattcagatatactactagtattattatcacaagtagcaattgtaatatctttaccattagtatgctttggtaaaataatcttatcatcatttaaagataggtcatatctaactgcagatggttgttttatgccagtgttatcaccagtggacatgctttccatttcattaacagtttcattgttttcacagacattttcctcttttatatcttcccattcatcttcatttttatcttctgaaatcattgctctaggtttagttttttcactatcattgttatcatcggtcacttgttcattttcttgtggttcacttgtagcaatagtatcttcagtttggtgaatgttaataggttgagagtctgttatttcttgtttaccgatatcttgttctctttctacttcagctagtgagccttgtttattaatgtcaactggatgttgctcaatctgttccgaaggtatagtactgtcatcatctttagaagcattatgcatgttttcgtctatctcagcttcattatctttttcttttccatgctttggatttgaatttaatgtatcttcttgcacgtcaacactattgtggatcttatttttcttgtcgttagtgttatcatcattattctcttgcgcagtttcttgatcattaattaaaaggtctgttatagaagatttatgctggattggcgattctccttgcatatttacttgtattctatcatcattattatcaaaaaaaatagtagaattagcattggaaatcttattgaattcctgaatctgctcttgttcaattgacacgtgttctatttccgaaattgtttcttgtttttgatcactcttttctttggataacatttcttttattgtatcctgatcaccagtaaaagcagtatctttgcttgttaaattatttatttcaccttcatttgttgattcgtgtggtgcattttcaacgaaggatttttgtgtattatcaattgcttctaagatttcttcttgtaaataactttgatttgaagtactttcttttatattatccttatctgtttcatttttattctctatattaatatttttaccttcactgtcaattatatctcttcccttattcccattgtcttctaactgcaggctataggtatcacctttttcatgcaaacttgtgtcatcaacgttattatcatctaattcaccatttaaaatatgctcatcctcgtttgcactatctaaagttgtttcattaatatccaaattttcatcaatcatttggttcatttgtttaacatctaattctaactgagaaagacgtttcttaatgttttcggtatctaatcccatcactactcaagttttttttttttttggagtttaagcaacgggatagaaatttgtaatttggtgtaaatatggttggttcagatatgttttaacactctgcggtagtggtgttaaacgaattatagaatgtatcaaatgatatctgtttatttatttgtttgtttatttctataactatttaatccatttagaggatttagatttaaaataacgagaaaaaaaaataaaaatgagaataataatctaaaaagtgaaataaataatggaagtgataagaaaagagaagagtgtgaacagtactgggtggattactgagaataaatcacttaaaaagtgtgtattaatatatttgggttttgtagattgcaataattgcagtagacaatagtaacagctgtttatatggatcgtgtaagggctttgataggtattaaaagccataataataacaatagttttaatactaataataatagagatataagatcgaatataaatagaaacctagaatatacgggttcaactccaacaacaagaattgttaatgagaatattggatcaagagatgaaatagctaggggggatggagataggaggttcataaggcagccgttaaatggaactgaccaatttagtctatatgatcaacatacagtagtagaaaatgaaggaaataatcctatagaagaaagcatgaccattaataatgacgatatccacacttttatatctgaatcacaaactattggtgatttatatacgcgtggatacgtcaacagatctccaaattttgattctgttagaaatattccattggtatcaattttattgactagaggcctttttgcattttcaagtgatatatcatataaaacttttttaaataataaaaggaagttagatcagccagcttcccttgataatggtggtattggtgttcctttgttccatgcagtgacaaataatgttattaagtctttattagtctctggaaaatcaaaagttgaacctgtaatgaagatatttaagtaccaaatcattgataacaatcatactagtagtttagaagatttagaattattaccaaattatgaaatcatactacagaataatattagtaataaatttttgatcaaatatgagttttgccaaatctttaaatctattgatgaaaataactcgttgaaaatcattcatattttgaaatttcatgatgggaaagaaattagaatggttaattttagtgataagaaagatattgatactgttgttgatgatttccctcttcgatggtatggtttttcagggtttgcatccccgtttggatcaaatgatattaaattattagtgttagatgataatatgccaagttatatggataacaatacgattaatagcggcgtcaataattcacatactaacaatgcaaatcaattaattagtagtcgacctttacgagctttaccaatctggggacgttattctgatacaaatgtttcaatgttaccaacaaagagaaccgtgaaattagcaaattttaaaattaaagagttatctcaagcaaccaatgctgctttatatactgattccgatgaagactcaacatctttaagtaatggaatcacaatgattccagaaaatactcaaattctgacatgtatgtgcatgctattacatgaatatgaatccaggaaggaaagaagacataagaataatactgcaaatgatgattctattttatttacaaacaactaatatcatttttcaaaacaattccattgatatggtgaacctggttatttatatgtatatacatatatagtatttctactatgtagttgattatgcttcgtttactaacaattcatgtatgcagcatacacacagatactttaatgagttaatgatgcaataatatttgaatagtgaatctaacagtaatacaaatgagtataactatattgttactatatgttctttttcttttttaaaattacttccttaacgatttcgtttacgatgtccttgttgttgttggtattgctgatgattttgattatgctggtgtctatctctattagatgaaggcggtagacgattatatccgaacatattattataccatttaatcatattcttcggtggttcaccaaacactaggtagtattcacaaaacatacacataggtttatccctatcaatcaatacggcaaagtctggtcttttattattaacgtttgttcctttaggaatatattcaaagtcatgatagttatagtttttgaatctctgtgaagctctgtgattagaatttatactatggtgaggacaacaggtctcgtgatcaaaaggatgattattaacatcatgctcgatatcttcttcatcattaagattaccatctccctcttcctcactacccatattatttataccaatattagaagttgtttcatattgtctggtatcatttacaagttcttcaattctagtatgatcttggttacttagaattttatgcttgttgttttctaatgaagccactgtattattatctaattcagttatacttaattcattcccattgattacagcatgtaattgtccctgagaatcagcaggaaacccatttggtagaacagattcaatcatttctgatattcttttaccaatagcatctggagacgcgtcatgtgtttcataatcaaatattatttcagcttcttcaccatcaagatgtaaatctggatttaaaaaatcctcattcatgaactcgtgtacttcagagttatcagtactaagagtttttttagatttattaacattcttattactattgtgtttatcatctatatttatagtggcagttgttgtagttgtgagatgattgttgttagaatctatcacttttgagttatcttttttactatcatctattaatcgtttgccattatctctgattacaaactgcatggaatgttgtgtcttatcaaatgcttttctgtcctgtaattgatttgaaagtatactagtcagagctttaacaccttcctgcatcatgacattgatcggaagtggtccattattagaaactagttctatggatgtatcagtattttttttatttgtactcattgtgagattttacacgttccaaataatattcagaagagaaacaacaataatgaaactaatgatctaaagatacaaaaaatcaatcaattttctggttatccaatcttttgtcttaattctggtcaaaaatgaatatatgtaacacactatttttttcttatacaaatttttttccttgatgataattaaataaataatctacaaaaatattctttcactttaacttcttccttgtagcatgtatgaaacttatttaaattcttcctatttgaatagaccagtatccctccctttgtattaaagataatataattccacctttttattcgattgattttctttgtatcaaatattgcagtttttcataattctcttttctcttcttttctcctatggcatcggtagaaaaagagagagtagataaaaaatagtcaaagaatgattgactaccaacaattacaagaatacatcaacgaatttatatatttttatctaccgtactaatgtattgagaaggcatggttaaacttaagtttctataagaaagaaagaaaatttattaaaaaacataaatgcaacagcattatcgtaaaattatatacatattcctatatatatttatatagaaacgtatgagtacatttttatgcaaacatgcatttatatcagacaattttccattcattagtttttctttagagtacgttgtttttctgcattttggatgatcttctcatcaacaaacaaacctttacatcttctaatagcattcatgtgtttacgggcaatattttctcgatcagcagtgtcacctagttcctctaattcttcttctgtggttggaacccagaatggatctaagtcgatacactcataaccagaaaagattaactgcggttgagctgcacctgatgttttcttacgtagatcttcactaaatccaaaagcttcaatgactgggatatgtgcctcaatttgaaagaatggagtaccttccttcatctcctcagatataatcttaccgtgtctttgttgtaccactgcatatactttacccaacacatcaactgaagtttgaatatcacaggaatacattgcccacattatccttggcgaccaatctaagaaggattgatggatttggtccctaatagttgtaatgaatctaccaaaaatatttggaatatctgtttgataatgcggatcattaatattagataattcttcctcacccataatatgaatatcttcgataacaatacacataccttgaactggttcattagccaatggaccttcttttacagataattgaaatccattaattactgaatctgcaaactctaaagttcccaaagttttcttttttatactacccaataacccattttctgaaaccaaaatattacaaccatatcttttgggtccaaacgctgatattttgtcaatacatgtagaaagataatccttattgttttgatcattttgtaataactcgtttaatttagtgaaaaatgtttccttatccatcacatctataccctcagtaaatgaatcatttgaaatatcgtctataattctttttattgttgattcattcttatccaaaaaatgagtaattctatcactcaatggcaatgatcttaatgtgattttatatgaaccgagtgtagttactgtaacacttctacctaggtcaggatttttcattggattcaaatctgtagtctctaaaaaggtttctctatatggaatagctggttctgaatgagtaagttcaattcccgcaaatctttcgtgaagatcctttaagcatctttctaaatgtagctcacctgcagtacacaaaatttgttcaccattatcattgatatacgtatctacacatgggtctgcttgattaagtaattttaaacctctgactaattttgacatttccattggattaacaggttcgacagcaactctcacgattggagttgtatggatgtttataccagctaaatttactcctctaacaccagattcaattaaagtaccattttttaaaattttaccagctaagccaccaataccaacaatatttcctgccggacactcctctaaagagactaactctttccccataaataggtacagatgggtaattgtggctgtttttatgtgttcggttggtttctcaggatcatactttggttccaaaacagaaacttcttgtccaacacgtagtgtaccactgtacactcttgcaaaaccaatcaaaacttcatctctttcatcaaaaagatcttctaattccgcttcttcattcacttcatatccaatttggtttactgttaattgtgattctaatggactttcttcctcatactcaaagattgcgtttaatggattggttgggtctaattcttgtggaacaaattcaggtattaaatcattgccatcattaaattcatcattactatcatttcgcctagaagcaaattcagaattgagtgatgcaaaatctttatcaactatattattttggtcattttcctttgttgcttttttcctactcttctcatttgaaagatcaatatcaggggtaaatgtagtgtcttcagctcttttatataagtctgaagaatttatgtctttatcgtctgtattcaatttagataatttctcgattaattcagctcttcttgccgcgtttaatgcttcttcacgaaatttcttatttttgtcaaattgatcaggagttattgtattaaatttaccttcaacaggtagttcatctcttggtatcgaaagtatctttgagacatatgcagacacaggtccttttttattacaatcacccatagcttcaatcaaattattatcaacattcaatttgctatgatcatgaccaataatggtatccaatctttctttttgagattctaatggagagggtaatttctcaatgacagttaataaaacagctgtactaacaggtaaccactggcttattatagttcttaataattgtttatcatcttttgatcttaaatctcttggtaacaatttaatatttaatgcttttgtaatcttttcaatgacttctaaattccttcccttaataactatattttgataaattttccaaatattatctaatattaatgtgacaaataacggttttaaggatctacccttcaaacctttttgattaataattttctttgttttggggtccatgtaaaaatcaccccataacactttctgtagattatctcttttagcacccaatttaatttcataaaatttagctaattggccaatattaaagccccatccatcaatagcggatgcaaagataacattattattggctggattgaaatacagatccgaatcatctctttcggtaaattttgcctccatattagtttctaactgctctctccatgtgtagtcatccaattgtttttcacctacgaagaaagagccaataacagaatttacttgttcaatgactttatttaaatgcaggtatgcctcttgtggagttaattgtaattctgtgattaatctatcgattttatttaagacaaggacaggttttaatttctcaatccagcattgtcttaaaacagtaatagtttgtgaacatacaccttcaactacatcaactaataccacagcaccatcacataaccttgaagcagcgctcacctcacttgaaaaatcgatatgaccaggagaatcgattaagtttattaaatgttcattaactaaaggttcatcttttccctcctgtttatgcaaaactctaaaatataaggagatagcagaggattccatagtgatccctcttaattgttcatctggtcttgaatctaaaaatctaattttgcccgctaatctttgggagatgatcccgtttgaagccaacagggagtctgataacgatgttttaccatggtctacatgggctacaatacatatatttcttatacatgatgcatcattttgtaatcttttaaatgtatcatgaccaatcctcgacatattttaaattaatttgttttttctgtgatttctgtcaatagaagttattagtatagactgaattgatagattagttaatatattacttagttaaacaggggataagaaaagaaaagaaaagttaaatagatgtatactggctccctttcgtctatttcttgtagtgtgtggatgggtgcttcttgatcctattagttccccttgttaatttctgcctcttgataaattctttttttttaatcaaactatttcaggtatttctttttcttttcttttcataaattcgagattgttcaagataggaaaaaaaaaaaaagagaagatcaaattttgtgtatcgaagtaatgatggtgcataaagttaaaagaggtaaggataactttggaaatcgataatagagttgataagtgcaagaagaacgaaaggaggagttgagagacgattcaggtgagaaatgagcaaagaggatgaaataaaaaatataggtgaaaatggaaaaaagaaagagaatgaacctttagttaaatgccctgattgcggtgacttattgcagaaatgtttaattcaacagaactatgctatggtcatatgtcctaatgaaaaatgtgaatacccattcaatcaacatgagattgctgataatcttgtatatgtggatgataacgatatactggaggtggccagactgagattaagcaagaaatagttgtgtgcaaggaaaacaaaacgaaccttggtataagataatttttagtacacttacacaccgtatttagcattgttacgcatatgtaaatatatcattttgtagtaaatagaacaaataatataggtcgttaacaaataatagattggctgatatgataaatattccagaatctgtgtggaggggaggggaaggaaaaaaacaaaaaaggaaaaaatatgacgatatatggtaatgactgtttttattttgtaacatccgtacatctcaaaataagacgagttcaaaatattttttactcaaaaaaggtaggttgcttttcttgagtacgataatatccaattatggaaatttaaatatatacattttcggttgctttgcacactgacataaataagaaaacaagacaaggaaaaagaaggacaaataagtttgtttgcttggagagccaagaaagcaggaaaatatcttctctttctagtatgtacgatgtaagcgttttctctattggacactaaccacaaccatattggttctgtttatgtagatgggtgttgattcccatgttgtgctgcctttcaggtatcgaactgcatttcctttctacctaatctcccttccctccctccctccctcattctcctttggtctattacttccactcactctctgtatcctctcttcgtcctaatttttcttttccttgtagtctcatgactggtatcgcccccctccccccaggactacgacactcacactgaacctaactatgccgccacaacaaatctgctggcaggaagggagatcacacgtacgtagagtgtatggctacggctaattcaacttagtttttactctgttgctgtagcaagtaactagccaccacttagtctcacaataattactcgctgttgtgagaacgtcatctccatttacctacagaggtaaggagaaactgcaagtagagcaatctttccagtgtgtaaccatcccacctgtccacatcgatctatcctttctgccttccttgagacggaatgtaatgctaattccaatctatcaagccaaaaataaaaaaaaaatcttgctttatttgtctaatgtattgaaaattggatacatacttgatattacatgggtattgtgtaggcaatatttgttcatcttagacgtctaaaacggatacctcagtagtacgaaaaagcaatagcagtcacaatgggtatgttggattcgttaaaaatcgatattaaggatcagaggatgagataatgattttttttacgaattgagaatattaagagaaacttgatgaataatgactaggtttttttaaaaagtgtggatttattgtttaaagagaatgtgttgctgtggggtttttttcaatggcaaattaattgcggtttaaatttgattacgtttattacatagagtataactaattaaagaataattatgtggtgaataaagatgaatggatgggaaggaaaggcaataaaatagttgaaattctattgatttgtccagattatatatatcatatttaattaatgtctaagagttctacagatgtattagagaaaatatcatatgtctctgttgttgttgtctatgtgctaattagatagcaaaaaaaaattatatggttgcataatgtttcacttctgatgtccgtttaacaaacaaaaaaataaactttgagggattgcaaaaagggatttttatactaacaaaataaatgaaaccatttttgatatttatacctagtataaatattaatatggaattattattatcatgtgattgttgttcataattttaaaaattattttttttattttattttttaaatagttaacgttccaaagactagaaagactttctgtaagagtaagacctgtagaaaacacactcaacacaaggttactcaatacaaggctggtaaggcttctttatttactcaaggtaagagacgttatgaccgtaaacaatctggttttggtggtcaaactaagccagttttccacaagaaagctaagactactaagaaggtcgttttaagattagaatgtgtcgtttgtaagaccaaggctcaattaccattaaagagatgtaagcatttcgaattaggtggtgaaaagaaacaaaagggtgctgctttacaattctgaggatattatatataatagaatatatatatatttttcatattacacttataagatccttgctacgtacacatttaatttaatactactacaataaattagaatatgttgtgtttgttgttttttttttatcgttccctctttcagatgggagtccagcaataagcgaaatccattaaaacacagatgtcagtgtgtgcaaaatccatatcgatgccagtgatcgaatatctgtaaaaaataataataataattagcctattctgtttttcttgtgtaatgagtcaatatttactgaattttttttcattacggttatccttgttagttttacttaattgttcttatatgagaataactaaagtaccaaaactaatgttagtagcagtcgtggtatatggattcaagttaaagaccacaccaaaaataaaaaaaagaaaaaaaaaaaaaaaaagaaagaaataagagaaacagagagacgaaaagaaagaaattatggataagcactaaataaagtgatcgttctatgtgattttgttcatgtgaatggcaaaagcgaaaaaaaaagaaaaaagaaaaaaacaagaaaagaagaaaacaactgggtttgaaattttcatttttcccactgaaaagagaaaaaactgaaaattcgtgaaaaataatttaaggaactgatggtacgaaaagaggatggatacctgatcaattttgatcagatggatggatgaatggatttaagcatcgccacacacaataatatataatatattttttaataaagatcttaacactagtctttagcacattaattctatggttacacaatactcaacggagaaactttaacataaagacaaggagaaatcatgtacagaaacaaaaatccgtatgcaaatcatcaacaatacaacgaacaaacaaattctacaaatgcaaacacattttatcaacaacaacaacaaaaccagtatcttgatgaaataaattcttattccaaacctcctgcatctaatttcagtagtaattatatgaataaccaaaattctcatcactcttttcaagaatatgcacaatctcaaattacggggaatgatataaataacacaacagggaagaatatatcattaaatcctggtgtttttcaagatgtaccatcattgactcttccatcaaatataaactatggatttctacaacaacaacaacaacagcagcagcagcagcaattttcaagtagtccactacaacagccacccattttaggaagtatatataagcataacaataattcaaatagtttagtacagaatacaacagggctaagtcatcagcatgattcacctatccaaggtattcctcaaccaagacaatcatttagtccaagtcaatattcttctgaatcagattataatagtattggactgggacaaactaatactaataataacctcagtaatacaagtaataataattccaatttcggaacttcaaatagtaacgatcatagcggtgcaagtagtccattccatcaaccgcactatgagcatagcgattcggtatctcaaagaagtgcagcaataagttttactaatctacctcaacctggtgatagtaataataatattgggaatgttagtccagtattatctcaatcttaccaacaatcaactttcaacaacaactataacaacactaatactactactactactactaataataataataataatgttaataatgttaatattaatgataataatagcaatgttaataatgttactgggaataactatatgtattttgaaagacgaccagatcttttgactaaatctacacaagataaagctgccgtggttaaattaaaaattgagaacttttaccaacaatcagttaaatatgctattgaaagaaacgaacgtagagttgaattagaaacagaattagcatctcatgattggtctgaagaaaggaaatctcgacagttggcttcattgggtaagaaagaatcacagtttttacgtcttagaagaacaaggttgtctttagaggacttccaaaccgttaaagttattggtaaaggtgcattcggtgaggttagattagtacaaaagaaagatacaggaaaagtgtatgctatgaagacattactaaaatcagaaatgtataagaaggaccaactagcgcatgtgaaagctgaaagagatgtcttggcaggcagtgattctccatgggtagtttcgttgtattattctttccaagatgctcaatatttgtatttaattatggagtttttaccaggtggtgatttaatgaccatgctaataaggtggcaattatttacggaggatgttacaagattttatatggcagaatgtattttggctattgagacaattcataaactgggttttattcatagagatattaaaccagataatattttaattgacattagaggccatattaaattgtccgattttggtttgtctacaggtttccacaagacacatgattctaactattataaaaaattattacaagaggatgatgctggcaacgccaataacgttaacaatggtttcaacaaaccaggtcaaaacaataatactaagaggcaaacaatgatggtggattctattaacttaactatgtctaacagacaacaaattcaaacttggagaaagtcgagaagattgatggcatattctactgtgggtacaccagattatatagcaccagaaatttttttatatcaaggatatggtcaagaatgtgattggtggtcactgggtgctattatgtacgaatgtttaattggttggccccctttctgttctgagactccacaagagacatatcgtaagattatgaattttgaacaaactttacagttcccagatgacatccatatttcgtacgaagcagaagatttgattcgtcgtttattaacacatgcagatcaaagattaggtaggcacagtggtgcagatgagattaaagcacatccattctttaggggtgttgactggaatacaattagacaagtggaagcaccatatattccaaaattaagttctatcacagatacaagatttttcccaatagatgagttggaaaatgtcccagattcacctgcaatggcacaagcggccaaacaaagagaacaaatgatgaaacaaggtggtagtggtcttaataatggtgcagcaattaaggaggatttaccattcattggttatacctactctagatttgactatttgaccagaaaaaatgcattgtaataaaataacagaaatgcagtagtctcattatcgacatagttagaaataaatagtaatatgtatgtagattcgacgtataatatgttggtagtaggaatcaaattaataaaaatatccaatattattcgcaaaatcttatcaattattagaaattgtcgagattctatatattagagttcaaaggatccgaaattcaaagttcaattgtgtaatatttgccttaagacataataagagttattttataacgattaataatgtgcttctgtgcaattcaggaatattaatttctatatatgtgttgaaaatatcagacgaatatatattaataattgatatttgaagacaaacgaatagacacaaataatcacagtattgttaaaagcaataaaaaaattggtgattaagagattaatatagataaccttttattcaaagaatgaaaatacatattgaaagaaaaaatagaagataatgaaacaatataacatattctttgtaaacatttttcgtaattaggttttacactcatatatatatatgcttttattctttattttcaagctcttaaagaggttcagttattataagcataccaacaatgttacttctcaatcatgaccattatgctcagtagtatttttggacatattttcttatttatataatattttattaataatttcctatatcagctggattagacataaaataagaaaatatatttattattaaactaaaaatgttgttagaatgaagaaataaatgataattgactatatggtaatcaattattgttcattttatctggtattttgttgattttttttttctttatttagtacatattttaaacaggcatgttattataaaatattttaaaattttgacacaaaacataaaatgatgaaaattattatctcaaaactactcattcttcgactacaatagacatcaaaatattaaaattatacacgtaacaaaagctctgctattcatgaataacagcataaaaagtttcatggttttccaaattacacgattttgtaagagtaaaggttgataaaaaataaaacaaaagtaactacgcaagtctgtcaaaaaattactacaaaaaaagatataataaagtgataaattggtaagaaagatgcctaaaactacatctcttctaatctatgattgctaaaatctctaaaccacataagaaatggttagtaattaactaatgttgaaatagaatgttttgtaatgaaatagatagaacaataagattttagcagacactaaacggtaaatttttgagtaataatcgttgagagatcaccaaaagttgttgagcttgtttattaaatatcttactgttcgtagaagaaaatggcttaatgttaacatatataaagccaaggatttcatcatacattatttttatcttatttgcaatctttgtatattactatttctatgttgtatatagagaaaaacaaaagtgaagaactttattataattttgtatactaaatctgtttaatataatattgagaatgtttactatatattgaatgaatacaggtgctcattctcaacaactaatcacaatattatcgtcactaaaggatctaattatttcaattaggtaacaaaggagtgaaggaaattaaatagaaatttgtagaacaatttgaaaatctcctgtagctcacctgaaaatactaaatatgcttaattattccttagtatataatcaactaaataaataaatctcctttctaagtgtcaacttatgagaagaaattgcatttggcaactcacgtttttaactttcacactttgaaaataaatactaatcaactatcaaattttggaaaaaaaaataaaacaaacaaacaaaacctagaaaatagtaagtgatatcagtcgaaatattaaacaagattttcatacagaaatactagatgacttcacaagaacgtaaaccttcaagaaaaatatacatgacatatataatattaaatattattattaaaaaagctgataagaattatctcctgttttatttaagcgtttttaactttatgaaagttctgatttttttttgtatattaaatgtcacatgtcattaaaagaaacaaaaaaaaaatcttgtcacttaccttttaacaacccgttatctgaaaacttacgatttcattattctacccttaactagagaacttttgatgacttcgaatgaaccgttttcaatgaaaaaaagcaattacaatttttataacttatcacgacatttttgtttattactacataaatgaaaaaatacaaacaaaccaataaacagtacttttttaaataactaaatactaacgttatttgtaactattatcctcaaagtgtctattgtttttctattgaacctcttatctatagagtaattctataaccaaattgagatcctatctatgtctgtttttgatctaaaagtaattgacagatgtctttagataactttcaattccaataataacagataaacaaacaaacaaacagaaaggtcgagatacatacaaaaagttctattgtaacaaatcttataataaacaaaatttacttacaaagacctggctttttctagaaaaaaaaagaaagaaaaaaattaaataatagaacaataacaaccgaacgagaaaaaattaattactttacctaaagaagaaattaagtcaaacgaaaaaaatcaactcatattacccttttaatttaccctattgttctggaaaatttttttctcactcttttattttagttaaaaataacaaaagaaaaactagtagactttaacaatatagatgaaccgtcaagaaacatagcctcctttacttttcttaactcatttgaaaaatatatgccaaaaaagtactttcttactaaatgagatatttcaccattgtaatagactaaagtatagaaagaaatgaatgtttgttgtactaaaccattttgttgcagtccttatgattaattcatagtaatatcttcaatgtaggagatctccttaaaaatctcagtattgagaaatatgtaattaagtggaacagatacaaagaactgaaaggggcaaacaaaataaagaggtattttttttgcatttcttttctttccctcttctcccactcttaatttcctttcttgttctttattttttttttctacgagagtcatttcctttcccagatttttacctatatgggtacaaaagatcgagatttatttacctgaaaagtaaatattatttcctaataggggaagttcgttcggaacttcagtcacccaaagaagtatacacatttacaaaaaaggaagctttgtattcattggatattaagaaaaacaatgattacatgatcgtttgcttcaataaaacctcgtagaagaagataaactaaacagggatgatttcaaaataaggaatgacttgaaggaatcgatagaaatagtttaattctgtatctccttttgatttccatttgtaaatatatccttttaaggaaactgtattatagtttacactttactgtaaagggttactaaaattaaagtttattcaggtttgtctccagttaaaacaaacctctcgaggaattgtaaattaatgcgcatatatacatacgaatatatatatatatatatgtaatgggatcttatcgcagattattcgtcccattttatatgtttgactgtctttttcttcacacacttcagtgtttaggctcttcgcatagctgagcacagacgcacaaagaagaagacgaacccaactgtataggtacctgttcgataatatttaataatgaagtttgaatacgttttttccaccttactggcaactgctgctttaactgaagcttccccagttaatatctttaagagaaatctagctgttcgtaatgtacactccttaaatgaaacttattacaacaagactaacacatcttctcaaccggaaactttacaatacgttattgctggtagcaaattagctgaatctaactctacactatatagtaatttcaccgaagtttccaactctacccgtggattaaacttcaccgaattatatgatgttgctcaaaacatcaatactactttaggttactctcaaaccaaggctggtgttgttgttactaatgaaaacaccattgaatccctaggtttcttatcatctttgttatttgaatctgaaaagccaattgttattggtgaagatgcttctttagctgctattgttgctaataacacaaatgctgcttctcgtggtccattggttgttaagaacaatggttatatctacgctggtgctttagccccatcctctgacgctgctggtgttccattaggttttgtttccggtgaacaagttaactttttctatgaaccatgtttaccatctatcattgctgaaaactctactatcagaactaactatactaacttcacctccttggatgttactgaatacggtgtagctccaatagtcccaattgtttacgatgctgactactcttccctattgatcgaaggtttagctgctgaagttcaaggtttagttgttgtttctgctaatgctaccgcctctaccatcacatccgacactttaccaattgtttacactagcccagacgctccattcgctgctgttactgaaaaggatatcccagaaggtgccattgctggtggtaacttaactccagttaaggctcaagtcctattatctgttgcttatgctaatggtgtcactgatattgaatctctaaagaaggtttttgcttagacgcatagagaccttcgtactttcttttttcctttttttttgagaattcaatatcaatgtttttcagtacatacctgccttttattttaggcgttcatcattaatttgttttcttacttctttgcacgtttaaattagagactattcgataatgtaaccttttataagagatctattctggagtctcttcataataccccgcataatagcccttatcgtttgaattcgttggtgaccaggatattggtttactgcttttttaatctttatacttttcaatatacgtcataaattttttaattcttttacatatttagtaattatttttctaatataacgatacttaattcatatatttcaagtttgtaatatatttgactggtacatgggaataacgtaagctaacttaaaataaagatttttttagtgacgctgtagtatcacctgtttgttgttcaagaaaaagaggaaaaatgtttcgatctgaaaaaatgatgttacatttgaattagatgctaaaagtggaacagtgtacaaatgagaaaaggcacagaaaacaaatattttctattgttaggctacttttgaataaaaaagtatcaaaaaaaagaagaatcacctaaacatatcagtaaatcttaaatcgacagaattattagctattatctttgatttactaaaccacattaccgaactatagaaacctgtgttgaataaaggaaaaaaaatattttcatttgaatttatccattccaacaaacaatcacgttttcttacataaatcaaaacaaaaaaggaataaaaacataataaggaaaagcaattgttttcgttgtcatacttcttgtaataattcatcaatgaatcttcaaagtattttgctgtaatattggttttaaaagaacttttcaaatttatatcatttccataattagtttagtaactatatagtcaataaagttgccaaaagagtccaagagatcctgcatatctaagtacacatttataaagaaatgtacacgaaactaagtactactcaactacaccttcaactctgccttcgtttttggttttatatcttaacactattaccttaaaaagaaaacaataataagaatatatttatggttttctaccacttttattttatcttattattgtgtacacaaacacttatctattggctaaccaagtaaaataaccaaacaaatgtacccaccttccttatcaaaatttcctaaacgagtttatccattgtatttcttcttgtttatgagtgttcttatctaaatatccctttattgatataaaatcatttttttactgaagaaacaacgacatgttagcaatgccaaaactcactaattttttttttcttctcttatcttttcaaaatttgacaccacctttttctttccttctttattattttttttgttttttttatcttatcaaaacttctattgtttattagagattagaataagattcttatcttaagaaaactcttatcagtgaaaacatattcttttttactattcttttgagtctttatcaactatgctttttcattatggtgattaagtattgacctcaatgaggagttcgattaaatagttaattttatgtaattttgagacaggctattactctagcactccccttctccagaagaattattgatatggctaataacaaaacattcttttttttaataacgactatacattagaagatttaacaatggaggaagaaaaataataatcggagtcttctaattataatatttccaattcgaattttttggataatattgtttataatcatttttttatcagatatttgctaatatgtatgcttttttttattaatttacaatagatgtaagtctttctcctacttcaattacagtactccattaaatttcacacatcaatgactaaactaatattcatcttttcatttgtgttactagatatttcatggatacagttaagaaataaacaaatttgtatataaagaggaattattataatttaaattcaagtattatcataaatacctctttttcttgtctgatgcaatgaaaagaaaccatcagcgtatagtatttaaaaaaatactaccaaatattgtcacaattaacttatatcaataaaaaataaatatgtcatacaattttacaggcacacctactgacgtaggcacaggaggtgattcattaaccactgatttgaatacacagtatgaacttgtcaatatggcttggctaggtgtatgtactgccggggtttggctaatggtcccaggcattggtttactatattcaggtttatctagaaaaaaacattcactatcttctttatggctttctttaactggcgcatgtgtctgcatatttcaatggttcttctggggttattctttaaccttttctcacaataccagaggtaatggattccttggtactttacagttttttggtttcagaaatgtactgggtgcaccatcaactgactctgcagtacctgatattttatatgcagtttttcaaggtatgtttgctaccgtttctggtgtcttagccatgggtggcggcggcgaaagagctagattgttcccaatgatggtgttcttattcctatggatgactttagtatattgtccatgtgcttgttggacttggaatagtagcggctggtgtgctgtccttggttcccttgattttgctggtggtattgtccatcaaacagctggccatggtgcgttagtatatgctttagtattaggaagaagagataaaaagaaaaatggctcaatcccaaaatataaaccacattctgttacctctgttgttttaggaactgtgtttttatggttcggttggcaattttttaatcctggctctgcaggtaatgccactattagagcttggtatgctgctatgaatacaaacttggcagctgcttctggtgggctaacctggatgttcattgattacttcagatatgacggtaaatggacaactgtcggtttgtgctctggaatcatttccgcattagtaggcatcacaccaggtgctggttttgttccaatttgggcttcatttattattggtgttttgaccgccattggctgcaactttgctgttgatatccaatatatgctcaagattgatgatggctttgctgtttgggcgcttcacggtgttgggggttgtattggcgctgtgctaacaggtattttcgctgctgattatgtcaacgctaccgctggttcctatatcgctccaatcaagggtggttggctaaaccaccattggaagcaagttggttatcaattagcttccatgtctgcaatatgttcttggacttgtgttgtcactgccattatcttattagttatgaacagaatcccatggttaaagatcagattattaccagaagaagaagagagaggtacagatgctgcagaaatcggagaatttacataccaaagtgacgatgaagacacatctccaaccaacgaactaaccgaatccgaagaagactatacttttgttccacaaccagtcagatctagagtctctgtgatggcctccatcaaaaataaaatccatatatcagaagacaaaattggacagatagttgatgaggtattaagtaacaataatgagaatttttcaagtagtgaagagaaatctgccaaggaaacaaactaagtacatcacaaaatactaatgataatataataaattaataatttccataaacaaataaattcattttacaacatctccgttatttcataatcatttttttcataataatatagatttttttaataatattagtaatatataattatcctccaacatcaaataatataataagaattatttcttttgtgatagttgcaatacttatatacctttttttattgtgtttagaaaatgaagtagtccgttaaaatgtttgtacttaatcaataatccaagtcaaatagcttttaaaacattagaattttatatacaattacaaaaagacatctttagtatacacatttgactctatatctatttgattgttaacagcttttgttttttattagccaattaacgttccaaattaatattatcaccaaatttagcatatagttgagtctttaaatctttaagtcttgaatcaatagtacttaaagtattttctaatagatttattttatcatcaattacctcagtatctttttcaatctgttctaacactttactttgttttaaatacacaaaaacctcaccgaatttatattgaactttttcatcctcagcaatcaattccagttccattgaaacatcatccaaatattctttttcctgtttttctttcgataattccaattccaaagagtcctttcttaatatcaattttgaaaattcattaatctttttttgatcttctaaagtgacctgaacattatttcttttcccttctggtaataattccattttggaatcaaaatacaataataaaaatgattattatattcctagacttttcttatttccatagagaaacatcaccatataggtcaataataatatatgtttcttgtttataaatttttcttttcctcttttattgttcggttttattctcatttctattttttgttttagataataatagttaaatcgctctaattaaaaaaaaaaagagagtaagagttttattacaaatgaaattataccaaaatttttctataaaacttaccatttagttacaaggaatccaaaaaatgaactacttggactggcattcttttaattagctaatggtacaatagttagtttattatttatatgcaaattatttatatatatataaactaaacaattttgttagtgcttcccgttttcatttattattataagaatttagttacgacttcatcaactttagttaaaagttcactttttcttttatcatcacaccaagagccattaattgcatttttagcaatcataccccaaacattgtaattccaatgagggaaatctttggctacttgaatatagttgtcaaggatatacccaccaaaatatgatggatcatcagaattaatagaaaatgggatattattatctaaaaatttctgaagtggtaattcagacacagctttaacaacttgtagtttaacattagataacggacagacagtcaacataatattttcctgtgctaatcttttcaataattcatcgtcgtttgctgagtttatgccgtgatcaactcttgttacatttaataaatctaaagaatcggtaacatattgagctggaccctcttcaccagcatgtgcagttaatctcaaatctggattaagtgaagctgctttttcatagcattcaacaaacaaatttggcgggaaaggtctttctgccgaatctaaccctagaccgcttatcacgccattcttgatgtatggctcagcttcttcaatagtggcaagacattcccttggctctaaatgtcttagtagacacatgataagtttagaagtaataccatattgtttatatgcttcatcacaagctcttttaaacccattagtgacagtttctaaagagatacctctagaagtatgagactgtggatcataaaacacctcagcgtgaaccaaaccttgtttagacactttagtgaaataggcccaggctaaatcaaagaaatcctgctcagtgatcaacacattagtaccgatgtaataataatccaagaaatcttgtaaatcacggaattgagcatactttttattcaactcttctactgattgtgggaagttatctggcaatttaatattgtttcttgcggccaatggaaataacagatctggttccagtgtaccttctagatgcaaatgatgctcacatttaggtaattcttttaaaaactgttcagaaaccatgccttttttttgttgttttttcctttatcttttactctttctccactttagttatattattcttccacatctacggaagtacaaactagagaaaaacatatgtacatatatatatatatccatacatgttttagaacactaaatttgaggaaaaaaaaattttttttcctctacctcatcgctattcgctaaactgcgctatcttgggaagactttcttctacttttactcagcattgtcttctttctcatcgtctgcccaattataaaactcgacatcgccttctttttttctcctcgagcctcttactattatgttctttctttttctcacatttttcctttattgtcaataaagatctttcaaaaaattttccaaaattaaaaaaggaaaccaagaccaaaatcaagaaaaaaaaaaaacaaaagaaacgacaaatttgtgtaagtttctttttcaatttattttattttattttttttttctttctctttttctttttctctgtatttttagttttttcaccccctcccctctcacatttgtgatattttcgtacaaaatgcagaaggaatgacattgagaagcgaaaataaaaaaaaagagtaaaataaaaggcagaggtcaagattcgaaccggggatacaaatagtgcaacttttctacattctgcaacacgtgaaaatgagatatgcagacttgagctaaaaaaaaaattacaaaaacaaaaatagaaactgtccaaatcaagaaaatatcaccatgtacgtacgtacacagttttatttatttatttatttatttttgtttttgttccattttgtatcgtcaatgtctctcctttttcatcctttgtctattttattttattttatttttttttttggttaaataaatcaaaatttcattctaatttcttcaagagaatcaatcaatcaatcaaggtaacaaaaagaaaaaacaatctcaaagtaaataacaaagtatacaaaccagtatacaaaatacagtgtattggaaaactttcacttgtccattgagccatctattgattcactaataactcccctttaagtttcctcgagcatacggttttataaaggaacaagaaaggaagaaaagaagagcacacgtactcgtcgaataatcttttgaaagaaaaaaatttttttattaacttattttttttttcctttttaagattgactaaaattgatttgtgttttggttttcttagttacttacccattaattttttattctgttaaagtgacttaatactttctttgtcttcttttaaattaatattcaacaataaacagaaaaaaaaaacataataatatgtccaatcaacaaggttatttcaaccatccagctggtattagcactactaacacaacagcacatactgccaacactaatggcaataacatttctcgttcattaaacggtgtcaataacaatacgcctgttactcccaacacttcgtctaattttcaaaatgtaagtaatatgaagattattaacggtaatattgctaataacaataacaactataactataacaacaacaacaacaaaaataataatattcatattaatagtaacccaaatttggttaatcaaacagtctccaccccacaatctagtgttactaataaccaaccttccttacaccataccaatacaaatggtcacaacaataatagcagcaacaatagagatgattctactattgttgggttgcattataaaattggtaaaaaaattggtgaaggttcgtttggtgtactatttgaaggtgtcaatatgattaatggagttcctgttgctattaaatttgagccaagaaagactgaagcaccacaattaaaagatgaatatagagcttacaagatccttaacggtaccccagggataccacaagcatattattttggccaagaaggcttacataacatcttagttattgatcttttgggtccatcattagaagacctttttgaatggtgtggcagaaaattttcaattaaaactgttgttcaagttgcagtacagatgattactttaattgaagaccttcatgctaatgatctgatctatagagacattaaaccagataatttccttattggcagaaggggcacccctgacgccaacaaaatccatttaatcgattttgggatggctaagcaatacagagatccaaagactaaacaacatattccataccgtgaaaagaaatcgttaagtggtactgcaagatatatgtccattaatactcatttaggtagagaacaatcaagaagagacgatatggaagcgttgggtcatgtgtttttctatttcttaaggggccagttaccatggcaaggtttgaaagcaccaaacaataaacaaaaatatgaaaaaataggtgagaagaagagaacaacaaacgtttatgatttggcacaaggtttgccaatccaatttggtcgttacttggaaattgttaggaatttggcatttgatgaaactcctgactacgaagggtatcgtcaattgttattatctgtcttagatgatttaaatcttcaagccgacggtgagtacgactggatgaaattgaatggaggtcgtggttacgatttaacaataaataagaaacctaatttgcatggatatgggcatccaaatccaccaaacgaaaaacgtagacatagatctaaacaacacatggccttacaacagcaacagcaacagcagttacatcaattgcaacaacaaaaacaacaacaacaacaacaaggacaatataaacaaaatgaggaatctaaattagatcctacttcgtatgaagcatatcaacaacaaacacaacaaagatatgcccaacaacaacagagacaacaacaaagacagcaacaagctcaacaagcagcacaacaaagaataaacttgaataataatgtaaataatatcgatatgaataataaaacgtacaattatcaggaacaaccaaacacagtaaaccataaccataatgtaaatggcaatgtacaaaccactgacaacgattcaagtaaaggatttttcagcaaactagcatgctgttaaatgatattactaatcttaaatttcaaacatacacacacacatacgcacgtatatatatattaatatgtaacaacaaaagataactgttttttctatttatttttatattttgatttttaataaatgtaacataataatcatcgtaatagattcatatgtaaatgaggtaaacaaaataaaaaaaaaagaataacttattaaaaaaagtctttctgattaataatgtggtgttatatatttatttaatgtctatatacgtaaataattgtaataataatttcactttttaatttctccgcgaattaaatataaggtatctaatgtgaaaatcttatcaacgactctgtcgtttggattcaattctaccaattgctgattattattggaattaagtgccttataaagaaataacctcatatttggatcagctttcaaattaagatttttgataccaagttgggaagccaaatagtcaatgactctaccaactggccaaattttattaatatatattggttcaggttcttcaacgttacgatctacatctaacacataacaatatatatagattctattttgcactggaatttttgtgtctcccttggacaagttctggagagataatttctgagaaagattattagaagaagaagaggaagaagaagaaaaagtctttgttttatggcgattgaagaatttaagtaatttatctaaacttgatttattcagtgaagatttgatagtattgctatttggtatcgatgaagagggagatgacaattttgttgattctctaattctttctgaagctttggctggaagcaaactttggaaaaacttcccatgattattaaccattgaagatacagtcttctgggaattatccagtttatttactcggagggattcacagtgatgtgattctcttaatctatgtgaagaacaaaaatcttgattgcattgggaacaatggaagggcaaaaagtctaattgtctgcaataatagcaatgtgtcccaacatctaacatcccagtttccttgatcattattattgtttaatattactagttccttattattgtgtttgtatgagtatacgtttatgtccttgaatattttcaacttgattgacgattcaactatgccaaaggtggcaaattatatcaaaaatacatcagtagtttatatattcttgaaacacacacacacatacacatacacacacagaggcaggtacatatgtacacgtctatgagtgtgttaataattcatttagaggcttgcatatagtgtaaaattgaaaaatgggaaaaaaacaaaaaaaagtaaccaaaaataccacatggagaaaacccatacattacacaataccccatacaatcgatcaatatctatagatattatagatattcatatcaaataacaccacacatatcaatatcaaagtggagaattttattgactagtgactggcgatacatggttcagcatagtatcaataatctaaaatttagatgaaattgaataataaagtttcaattccaccaaatttccaaaaaatcaatgtaagtagcacaacgactattgtgatataaataacaattgggtataaatcatgcgtaattaggttccctgaatcatcaaaatatagatttatcatcaacggattatctttagtatagatcatatcatgtgaaaaattgaattctatagatagtaatagaaaatcattatctcctatattacctgttgaatataagtttacattggagaatgactcaattggatctatagcagaccaagataacttcaaatatattgattcatagtcatgatgagtggaattgagtgagaaaaattgagggctagtcagattagataaataaaatgtatttatttgaaaaggttgaattattccattggaaatgatattgtgatgaccccatttagatggatttatatcagctatagagtacctccaaatttctgtatttgctgctacatagtttaatagaattaatagaacatatgataatgaatatatgacaaaagagaacattcttacagagtatttttgttccctctctcttacacacattttccacgtatacatatagacaaatacatatatacaccaatatccaactacatcaatttattatatgattgaatcatctataattacaattttttattttttttttttgaatacctctcttcacttttgttcctttcactatcacttgaacaattcaaaaaaaaaaaaaattaactagaaaagattacacgtttaaaacaaaagaaaagggaacaaaataatggtaaaggacaattaaaaacagttaaaaagatctgagaaatgaaataaaaagagaactagtcaatgaaaaaagtaaagctaacattaaataataaaagagatatatacacatatacacatacatacatacatatacatatatatgcatttaaacataaaaaaagatgcttgacaatgctaacaacactattgacgatgaattatacaatagatttatcacagaggttagaagaaatatagaatctacaaataatataggagggagtaattcaactaatcctattattaattcttcttcttctactactactactggtggtggtagtgatgacaccaataacaatagtaataataataataactatagtagaaacagtcatggtgacatatatgcaagaatattaaggagtttactgtatattgactatatatttatgttaattacattgcccatgacactatacactatctttaatctagcaataaatttggttacttttaattttaataatagtgacaacgttgaaaatgttattggtagtgaagatatatttcacaaattacaaatatatttcaagtatgttaaagtagaagaggatatgatttctacaaccactggtaataataagggtaagtttgaagaaatactacttttcatatataataaattgtttagtagaattaaaacaattaattttgaatcaatgacgacaaatacaaataaacttaacagtaagccaagtgagatagatttaattgacacactaggactgcttggtaaattccacaaaacaataagatactacacaacacctttagaaaatctcaaattctatccgtcactaattaagagtttgacaacaataatttttctattatatgggtttattggttcttcgtatgtaattttgttgaatatgtttttcatattatgtctaatcctgacattatttagaaggtatcaagacgtagcagagattattattaaacaattctggtaaattgacaacaactgtaacagtagttaacggttgtaacaacagctacagccattgcaataaggttagtcaaagaaatagtacaagctaaaatctaatatctttttttttcatctttttctttttctttttttttttttttatagacgtagaggggaaataagagaaaacaaaaggaaacacagccctaatctccgtggcaaatgacaggaaaccaccaaataaaaaataaaaaaaaatagaaaataaaagtaagcgcacgcacaaaaagaaagaaaaaagacaatactactattttctatttttatctcaaaataataaaataacaaaaaaaaaagcgaaaagaatctaaaaagcagctttttattacaccaaattcctctcctatttaaagaatacacagtttatttttcttttctttaaaaaaaagaaataaaacaaaaaaaaagaaataaagcaacggatttagcaaaaataatagaaaaaatagcaaacaaacaaaaatgctacacccatacaccagcgctacgaattgtatttttattttttctttgttcttttgccttgttgttttttctattatttcgcgtgttttttttctttattttttgttattactttttaaaaatttgcctctctttgtttgattttttttaatgcggggtaaataatacataaagtcggtcgaaaatacaacataaagttcccgctattgtttaatcttttcatactgcagaagatcgaggctaaatcagctgagtcgattgttcgaagttacttaattaataactgacttagtggggctgggttgtatcgataaagcaaatcaaatgttaagcaaccggtaaaatatgccgatgtattcttttatatatagataaatgttttctcgaaaaaaacactatatacaaaaaaataaaatattagaccctctcttatcttacttcttacatcttgtaattagtgtattgacaacacctgttcatttatatataatcagtagtatcaaaagtctgatactgggagtgattccatctatatgtgtaattatagttggttttaatatcaatatatatacatacacatacacatatacatacatatatatatatcttttttatcatatttttttttaactattaatatcaaaccaaaattatctactgattactattatcatttatttgaacttcacataaaaatgtctatattttttacaagaaatgatagacatagaagtgattctgtccaatccttcgtgtcttctatttttagttcaaattcgacaaacctaaatgacagtgatgaatatatctctagttcatctttttcagagaaatataacaacaacaacaacaacaacaacaacaacaacaacaacaacaacaacaacaacaacaacaataataataataataaaaatttagatttcctcaatgcaaatgaggattattcccatgatttagattttttgcaatatattgatccacaaccttctttaccacctaattataatgacatcaatgttaacgctaaaggtgctatctcttttcctatctgggaaatacatcacacttctgtacaccccccagaatattctcctactgtctatgactatacaatagtatctattcgtacagaatatgattctcccaatgaaaaattacctcagtttaaatctaaagtatggcagaattttgtattggaaattaactccactcagataaatctgtacaatattcatcctaaattggttaaacttatacccaactataaccaagggattataccgaccagcattctttcctctttccaaaggaaacaagcgtatcagctggattcgcgcgataatgaaatgatcctggaccaaataaaaataaatccaaaggagtatctaaataggaaaagtttatatgactcgttctctttacaatatgcaaagtgtggtgtccccttagattttctttatagaagatttatacaggaattgaacggggagagagaaagtgaatttaatttacaaacgatccctgatgaaaaagttatcttcaatctaatcaaaattaaggaccagaaatatttaagggtcagattagaaggtaaacaattcttaataaaattcaaagatgtagagacaatgcttctatggtataaacaactgaatattgggattaatgtatctttggaccttgatttacgagaatttccagattatagagtagtacctagaagaagagctcatcaatatagagatttccattctactttttcgacagactatattgatgatcgtaccagtgattcagaaaattcatctgatttaagctcaatagaggaatcagaggatgaaagccttgattcaattctagaagacaatactaacaacgaaacagaaaaatatagatcagacagtcataattacacctacgaaaaatatttaagtgactgtcttcgctgtattagaccactctctgagatgaaatcatggttaaacaaagtaatagtcatgccaactaaagagcccaaatttacaacaaaaaatctacccaagtattatcatccagtaaacacaacaaatgacaaatttaagatccaaaatcattcactaggtttattcttactaaatgaagaaaatgatctagttcaattagatcattctgtggcggtatcatggaatagtctcagttctaccagaattgtttaacggatatttatctatacatatatatatctatatgtacaaatacacatgcatatataacattatgagtaaattatagtatgaattttatattctttaatacataactattcctaaatgttttttaaagtatttaaacaaaaaatatatacgtgtgaacaagaattatatcacagttacatatacatataaaaaaaaataaaaagataaaattaaggatattagataaatatggttaaatcaatatatattaaactaaaaaaacaacatcaatatatattattagataaagaacttaaaaaattataaaattaagaattcatgtagaatgtttcttattaataaacaaaaaaagaaagaaataaaaggacagagtaaaaaaacatttttaacctaagctattacacaaaaagttgtgctaaatggtaatctgaaattatccttgttttcagaagtcttggacttttcagcagcagaaacagtagaaacagtggttggttgcattttttaaagttttcttaatatctttgatagttgttatcttttgtatttgttatcttttttgtgtatggtcttatatgtttgatcattcaagtattcaatataattttacatgatactctctatttatatacatttggaaaaccaaaatcaatctcaagcattcttcatttacttggttaaacttttttatttttttttgatatcatagacatgtttcaatatatgtttcatattaatttatccgtattaatattgaagaatcatgtaaattgcccgaataggaaatttacatgatttgcaacagatttcctgagacaaatttaagattgcttgctcccatcattcttttttgcatttggtcacaaaatttatcatgtacctcaattaaagaaataaaacatttattatgtctatttgcttttttttttttttttacctcatatggttatataccttaataaacaatttgcaaaattatagtgtatggatggaccaaaaccataaattactactacaaatctcagattaaaaacggtataatcatagcaaaacataacaaaataacaacaattaatcttatcggatcaattgggttacttacatcagaatcaaaatccaaaggaccaaagataggaacgttatcatcaacattagctaccaaaggaaatataacagacctcaatctaaacatataattcataaacgcatcataatttgaccataattgattgagtgcaaataatataataaaaaacaatataagtggtttaatcagttgaactagtcgttctatattgtttatagatgtttcaattgttactccatcatctcctgtatggtggacaatttgaccgttattactgtttggattatttgcttgtttattgctaaaaaacatctctttcttaaatttagaatgtctaaacttatgaattgaaagatattgaatattactattatgtcactatagcagaaaatatgtatacacaaataaaagtagcaattaaaaggaatagaaacttatttacacacaattttcaattaattaatgatgatccacatttaatatttgtcgattataacgatcagccttgtatttttaattggtttagtaatagtttggctcttacaaataagattttaatattactgcaaattatttttttttcttggtttcaagatcttgaaaaataaaaatactcagaagaaaaacaatatagaaaaatggatgaaatacctaaaaaaaaaggaaattccttacaaagccttcctttcaatataaacataataatatttgaaaatacccaaatataatattataggaatcaacagtgcctatcatcattttctgtcttctaacaaaatgaatacagcacatacaaataccaagagatcacttaaaaaaatcctagattctgcatatgtagagaatagtgatgaagaagatcaagaaattatttctgatacaaacatagaacaagattatcaaggtgaagacgaagacatagatccatcactttgcattgaatgtaaggatatgaagacagagatcatatgtaatgattgtgatgaacaattttgtgtagtctgttttgaaatgattcatagaggcggtaaaagaaaatttcatgaatatattaaattgactaaagatgaaaacaataatgccagtgaatcatcgactggggatgtgcttaaaaattctgatgatgttaatataaataatgataatacaaataattttcaggaaaatataccatcaaaaaaagcatcaccttttaatgataatatgactaatgaaaattctataaataataaattattgcagattttaaaaaccaatgctgagtttattcctttaagattgacttatgaagaaagacatttgttaagattgttagaagctgcattacaggtttctgaatatacagatagagtagatatactctcatataaatcaaaaacgaaaagaattgtggaacaattaaaggagatttgttcagtactaactggtctagtaattgcttctgatttgaaagttggtaaaaaacttttagaattgaaaaattttagtgacaatgctaaatggttccaagatgtatttgagattggtagaagatacaagatcatgaatccagaaagaatgagagatacatatgggaaattatgttatatggttatggattcacgtttaccccaaattgaagaatatatggagttccatttatttaaacctattaaaactgtacattcatttttaacctcaagtgaacaagataacggtaaagctatgggcttatttgatgacaaactaactttatatgcaacatcacatatctctccagtgggtaaatctagagcacaaatacaaaaacttattagacaaaaggaaaatgctattgaaactattgcctctaaatatagtagtaaatattactctaaagaggatattcgtcaagtgttgtattcgattggcgattacaatgcctatattaatatgaacagaaagccagtcatgagaatgttagagagattagaaatttttaagcaaccagaaatagctcaaaaatattccatcggtattcaatatggtagagatggtgctcgtctaacacatgaccatgaaaggcaatggaattatgtacaacaatcattaacattatggtctattatccaaagagaaatggttagattatggtacatggcagattctgatttatttgatggtagtcactatagactagcatccacaggacatggtttgaatagattgaagtcatgtccagttatttataaggaaatgcataaaataatttctgaatgtcggtcaaaaactaaagcctggattggatcatctgtagtccatttaggtgacgatgctgttcctaatgcattatttttcttagataagtacactcaggttccaagcattttgattccatttgatcaaactttgctaaaaatcaatgatttagtaaagaacgaccaccatttattagaatatattaacaaagaatatggctctctagaggatttgaaattaacaattttacaagatgcatttacgcacatgttcgatggatctggtgctgacaatttctatatgagtgggtcttgtatcgatggtagattaacatctgcttggaatcattgtaacgaaatttccaagaagaaatattataatattttcttgctaacctcattcaacggatttaatggttctgaaggtttttaagaaggaattatattcagaaaagaggatacaatgtccatgatatttccaattttgttagataattctgcatttcaattattccattaacatacgtatagtggcaataaatattacaaggattgtttataacattgctatagtttatataaacagcttataaaaagtaatataatcttaaatgcaaggttttcttttaccttcatgcctagcttttatttctttaaatattaaatacactactaaacttttacaaggtgacttttatattaagatgaattgttattaactatgcttgttaaatgaaattaattatcattcgaaatacattagtaactttttttttccatcagcaaaatgattattattttattctcgatggatataaacctatttatctatgaaataaacgttggactaaagaggaaaataatatctatacaccatcctttatggtattaccatacttgattgttaatatatgtttttaactacatatatttgttactatttcaaaaatacaaacaagacagaataaggaaaccgtccttacacttttctatattaaagattcttctcacaagtattaccaactgttttgttaagaaactcagaacctatcatctgtaaattatttattttccaataaaatgacaataatataacatcaaaaagctatttattatattattattttagtatatataactagattgataaaaacattatactttagatagacataaaacattaatagttaactatattcatttatattcaaaagggaaatactatcctattagtacagctaactagtgactaattcattgactgtttcattatctgacgtatttttgtctacaacaatatcattgattctatctattaatctatcgataatacctatttcagcttcatggctacttctattggtatcgctatcatctatcctacttcctgcacttacaacactcgttcttggtgttctaacggcaccgaccttatgttgtctcctttcttcttcgcttaactcaagaacattagcagtaaaattaaccagtgatttagcactctttcttcttgcccatctatgtaatctcgagtcactagcaggcaatggagagacaatagaaggttgtggtgaaacatgctcagatatattaaagtacgaagaagctgatacagaagaccttggagtacgtggtagtttaacacatgataaaccaacatcactaatccacttagcaattaatgaagtccaacccaattgatgagatgcacctaaacctctaccagtgtcaccatcaaaatattcataaaacaagatatagtctttgaaatgctcatctgtagataatagtttagaatgttcaccataataaattgcacgttcaccattttcatccggaataaacatatgtatcatacggtaactaatctcttcagcaatttctgctaagttcaaatattcaccagaaccggtaggaaactctactttaaactcggaaccatagtataagtaaaatctttgtaatgcttccacaatcaaaaaagtagttgggaaccagataggacctctccaattggagttaccgccgaacataccagaatcagactcaccaggtaaatatttcactgtgtatttctgtccattaacatccatttcaaatggatgcttttcatgatactttgacaatgacctaacaccatattcagataggaattctgcttcgtctaataatctcgataaaagagcttttaatctatcctttgtaaccaacgataacaatagtctttcgcctgcaccttttctttccattgaagctatgtttctgtcaaatatatcagaacgattttcaataaaccactgaactctttttttaaacctaggaaattgagctaaaatactcggttccaatgtcatcgacgcatataatggaattaagcctactaaagatctaatatgtaattgttgcttgttgtgtggaccccatgaaattgcatcataatagaagttgtctgtttcattccatagattttgtttaataatcttcccggcaatattacagttttcatcaaatgcatcaacgtattcaaatgacatagaatcactgataaggatgaaatgttcaaagaattttgatgcaatagcttcataagtgggattctctttggctaactcaagagcaatatttaacatttgcagacagaagaaagccatccaaccagtagaatctgcttgttccagagtcccaccagttggcaaaggttcggatctattgaagacaccgatattatctaaacctaggaaaccaccttcaaagacgtttttaccttcagtatctttacgattaacccaccatgtaaaattcaataataatttttggaagacactttccagaaaaacacgatcttcacggtgatataaatttctttcaatcttaaaaacacgataaactgcccaagcatggactggtggattaacatcattaaagttccattcataggcaggaatttgaccgtttggatgcatgtaccattctcttgttagtaaattcaattgattttttgcaaaatcaggatcgatcatagaaaatgggatacaatggaaggcactgtcccatgatgcaaaaaatggatattcccatttgtctggcatggataaaatgtcttcaatatacaagtgtttccaatttttatttctaccgtttgcacgatcaggtggtggtcttggtttaattgctttatcgccattataccaattgtcccagataaaattgtaaaattgttttgtccacaataaaccggcgaacgcctgtctttgaatgtttctcaattcatcattaattggcaatggtgtgattctccaatagaaattatcagcttcttgttcccggtcgtcaaaaatagtatcaaagacatcctcgtctataactgcaaggtcatctgtatgataaatattgttttcaaaatcatctgtgaacttatatcttacagtgacatattctcctggaggtattgctttgaaatgatagatagcagcagctttagtaccttgattctttggattgacagcatttttaacaccatgaaccaaatattcctctactgcatctttagtgaattctgttgggtttttttcctcgttaaacagttttttcaaatttgaatcattttcagtgaagactaaaacaggctctatatcatcggcatcattactcatttcttcctcattttcgaatccacccggtgatggttggaaaacaatttgttgttgaccaaatttgtcagtgaaaagattaattagattcgtttctctcttgtctcttcttaaatatggtttctggtaaggtttcttactgttaggatcatggaatgcccaagtatttctaaagaagatctgtgggaccacatacagttcaccataatctctttcagatctattatgcacggtgattctaaaattcaaattatttggattttggtcatcttttgccatttcgaagaagacatcaaaatatggagaatcaccagtttgtgaatctttatagagaccatcaatgtcgtatacttcgaattctttgtcatgatagcctcttttagcattttcttctactaattgctcataaggaaacgcttttttgaagggatatttatacaaagctttcatataagaatgagtaggagtgttatctagataatagtacaattctttaacatcttcaccgtggttaccttgtgggcctgtcaaaccgaatagtctttcttttagacgacaatccttaccattccaaagagccaaatttaaacaaaccaattgcttattgtcagacacaccaaagagaccgtcttcaccccatctgaagactcttgcattagcgtgttcgaaggggaaattggaccatgcgtcgccgttgaacgaataatcttctctaactgtagcccatgatctttcacttaaatatggaccccaacgataccaatattttttatgttctctattttctttcaatcttttttcttcaactgttgaatcaacaaattcttcacgtaaaaactccattattgcacaaaaaggaaagaaaaagataaaagaaaaaaaaattaaagataaactgcttgatagattgtaatcactagatgaaatcaacaacaagtaaaaaaaaataataataataaaaaatcgaacactatttaagcacaaatagataactaaaaggcagaactgaaataaataggtatagtattcaagaaagggaaagagcagaggagggttgtaaaacaaaagaaaagtaaaacaattctttaaaatgtaataatattaatcaactaatgatttaattaattaaacattcggttaactaatcaactaaattcaatcagtcaaaatataacacaggtagatataatcattaatcttaacatacacacaaagatacacacacacacatatatatatatatatatacaactaacacaccacataacgtcaaactattttttttaataccaacattgggcatgcaccacttattttacctgtttggtttccatctttacttttcttattgcttctccctaccccccctactttctaattccctctctccgttgtatctatttcctacatttcagcactaagtaaataacaaataacaaataatattctaacccgagaactgttaaacagatatgttatattttcttttcttttctcttttttttttaaggggaaggggagaatatctgacattttttttaaactacctgtccgtaagtggtaaaacaatagcagtctgtagtagtattgtttctagatgaatgagtgaataagaatgaacaatagtaaaagaagtaataagaccgagccggattatttagacaattactattgttgttaatattacgtttgtagagattattaccataaaaaaggttcgagaccattttttttgtttttcttaccttttttctccttgttgtttgacgtggtgtacggatgatatgcgttcttttgtacggagtttggaattcagtttagaaaataagaagagaaaatggaggagaaagtagaagccagtacaaacagtgaaaagaatatagatgtgtgcatgagagatacaaaaattaatatgcctatttcataatatatatataaatatatataatataaattcatgattttccttttatttcaatagtttgaatgcaaagtaataatgctaaaagaggtgaagtgaatattttaaatgataagctaattagatagcaatcttgatataatatgtacaaatttctttctgttctgttctgttctgttttgtcttgttttgataaaatgatagtaaatttataagttgtttgtaagccaaagtcattagtcactaaaaataacaatcttgtcacagtaaaaaacgatatcagaaaaccatatagttaaattagaatgatgataaccagagttggtaattttgttgtgccatgttataatagttgtaacaactttcttctgtatttaaaaaaaaactagtagcactatttaaagtattgctactacagctactactactactactattactgcctctgcctctgcctatatttctgtcttctagagttttattcttcatccttattttgccaattttagatgtaggtagtattattgagtcatctaaagcaagcatccatccaccatcctttattgtcgtttcaatattattattaatagtaatattattattattatttgaattgtttatctgtatatttttcttacatttcgatgccagacttggtgataataaaactgatggaatattcttatctgtatcacaaatatcatctatattaccactcggtataaacatattcttaggtactgacattgaaaatacattttcgtcttccatagagtataaagtatgtgaattgagcatatttgtcttttccacttgttatatatatatatagatctgtatgtatatatgtgtgtatatgtgtatagtatcgttgactgtttgtacaatcgattcttatactttttttcctggtcttcctctttttcttcttctttcttttctttttttgtttttaacaaatatgttcgaaacaaattttgtcgctaaactcgcgttatttctttttgtttaatttgttcttacctgtagttctttacttgagtatcaattcaggaaagaatgtttatgtgcatattatatgtattctgtcaagtatacttactaagtgcaaagtcttccctttataatacaacctaatacctacgtctaaaacttcatatatatatatatatataaaagtatgtcaatctgacttagtttgtttacttatttctcctcaaagatcacttatattatttattcgtcactgccatattactattatgtcattttgtaagaaataataacaaccgtcaaggaaaaaggggggggaggagaaaaccaagcggataaaactgttttaatacagatagaaaaaacaaaagaagaaaaaataaaaaaaaacaagaaaaaaaaaaaaaagattcacaaccgcattcttttctcctttctttcgtgcttattctggtgtcattataaaattttatgtcacatataattaatcgtaatatacagagaaacctcctccccttccccctctcaattttcctcaacaataaaaagaaaagaaaaaaaaaacataattttttgtttcttattcttctcttttttattttatggcttcttcctttttgaaaaaccaaaaattgccaaacacatggggtcggttttgtaatttgtaaaatatacaaaaaaaaagaaaaaaaagaaaagaaaattgcagttcccccctctatttctctgtttttgcccttttctttttgtctattctgaaattcacatgatacaataaaaaaccaaacaaaaaatggtacttttaggaaaatgtttttaaaaaactcattacaaccctattgtaaattattgtatgtgctaacttttttcaagtaaaccctaataatatttagtttgaaccaaaaattatttaataatgtgaacaattgttacataaatagtattagatatacaacgataaacaaatgagaaatttattatcaactctcctttataatataactatatatatatctctactattaaaaaagtgtttacatccagctagaattggaacgcttttttcttttcttgtcttaccttttcaattacttattggatattcaataacaccattaaataacaaaaaaaagcagatacgaaataattgttgattacaaagttagtatactgaacgatattctaatacagacgtagaacaaaaaaaaattagaaagcaagtagttaaaatagagttatgatagtctttctccctataccatttattctatttgagctgtgtgcatgaacttcataaaaatggatatattccatgatgtttttataaaccctaactctaaataactaacataattgaagaaatgcaaaatgctgtttttagcccgatatttttatttttgcacatgtagtcctttctctaattttatgattttttttttttgaaaagaaaagattttcactttccaatcttagaaatgaaaccaagaagagaggagtattgtaaaatacttgaataatacatctgattgttttaccatgtaactgtccccaagaatacatgatataataaaagtttcatacgtaaacatgccaaaacataaagcctcagttgcaacaagaattacaaaaatgaagaaatgaataaagcagatcgtaaataattaatcatttcagtgaatctgtgaacttctgcttctgcttctgcttccattctttttctttattatcttatatacgtatacagtctaagcttgttttttgtttagttttgtttaactaaaacacacaaaaaagatcaaatgtatgaagtattatatacgaataaggttgcattctttttcttttttttttttttttcattttagtctgctttactaatatcattataatgatacataaaaataagtaaaaacagacaggagaagtaattataattctgcaataaaaagaggtcatcttgacagtatcaatcaaaaaaaaaaaaaaaaaaaaaaaacactatgataatttgtagttcgatttagaatgaatatataaacattttcaattaaagaaatcttcatgtcaactaacgagtcaaagataaaatttcataatacgggacaatataatggcaatatagtccagtttttcttctccctaatgtttttgtaactttttttttaaatatagttaagttatgccaaaatgaaccaatagaacctctaccttgttgcaagttgtgtgtctatacgacaaattagattgacactaatctgatacaggatataccaacaatagatcaatttaactccaagttgataattatacaatctagcagcttgaccaagttggtatctaccactaaatactaagaagaataaattccatgattgaatcaagttgatggcatagtatatagatgaactagataataagagggcgaatatattagattacaacatttacacatagaaaatagtcagttaaagaagaacataatgtgtctagagaaatatctaatcctaacttatattaattcacagttctagagaagatactttctgtactgggcatttgatctaagatcaaccgcgagcacgacagaataacagcagtgaagtgttattaggtgaataccctaattccatatgatttacgaaaaaagagataatcaacccacccaaagggttaaaaaaacataagatggtggtccgtgactctgggcgtctataagtaaaagacattgtgcccttcttaggcctgaaccgaaagatcaaacttcttaaccaagaaaaactattgaaatggacgtgtctcgttgagtttttgctacaaaacacttttaatttgtttatatactatttgaaaattttgatactgcttacaaaaaaaaaaaaaaataaataaaaaactctaagacatatttttgcatttgtagggtaactatattgacccaaagttagggttcctttataattgaaaagtgtacaaaaggtaaatgcaaaaaatataggattatatcgtggtcatcgtggtttatggagcattctttttataataaaaagatatatttacatgtattcttcttgattaatgaatattatatatgtgcctatatatcacagagaaacaagttatttggtaattcttttttcctttgccgtcaaaacatcataacgcaatttccaaccaaatgaccctaattctttgattcttgctggtttatctttacatagataattgtctaacccaccctcatgactaatagtacgtaataccttagtagttagtttcaaatgaatcattttattcaaagcctcactccaaagtcttttacgaattacatttgggtaccacttacgtcttgttttatgtttactttcggatatactgttaccaaattgaataaaactacctccataaagacctgtgttactttgtttaaaaatacgagattcaccatatggatagtctggatattctggtattttcttgactatatacgcaggtttgggatctccaactttatatgctttaggagcagctacttttctgatttctacttgtttccactccctttgcaagccaatatattgactaaaatatcttttaaaaacaaaccacttattgcccatatccaggttattgattgtatatcgtaatcaatgtagaacagttcttttggttatattatcttctatctcttactatttgttattcacctcatgcttattaactttgtagtaatttgttcctctatatttttctttttgtcttttttacttttaccctctatatttatttttaaaaaaaatcacggacacataaattaaaagaaaattatgctaggaatcttttgaagtagaatgtatacagggactagaagttaccaacctcttccgatatatagttattggtataatatcttatccttgtccattttctatgatattcatatttaataaattatgaataataagcattaattcactaatactcttattaaattatagtgagcagtatataaatattgattatagatatacataatctgagacaaacagaaaaaatggactacatatttctttattggagagattaattactggaacaccttcttaaatccagtccatgtgctatctattaggggagttctagacaatgggttatcattcgaaaacagatgtgataaatagatacctttttcatttgcatttgtcaattccgttacaaggttttcaagttcattgatcttatcttgataaatcagattcttctgcatgacattggcatttttctttaaagtatcatctaaatttttttgtaaatcacttggaattggtttgttattggaacccttattttccctgatctgctgttccaactttctctttgcttctaatacttctatttttaatcttgaattttcactaagtatactgttaatttttaattgactttgtaataactcgttagcaatagtgacatgctctctatttagaagtgtataatcatgttctaacttttttacctccttttgcaattctttgttctccgtttgcattttttggaattcatctctcatcgccttgtctccactgtatatctcatcatattcttggctaaaaagtttaagcaaattgggtctgatcatagcaggggaggctgatttcttaattagttcattgaatgaaagaaccctggcttctattttaatatcatcactagtgttatcgctacttgttttgtcatcaattggtaataagttatttccatcctttaaagtgaccaataattcttcgtattccatagacattacttttcttttattgaatagcaaaatttgacaactaatggaaagcaaaatatcaaatccataaaaaaatattaaatcgataaatataatctgctcagaagaactaaatccaattttttggaagatggacttgatccaatcaataacaaacattcttgacttaatcccctgttgtaataaatgattgtataaatcaatatcatgctcttgtaacaatctatcgaatttaaacagtattttattcatatcattaaattcattgtttaagaaaaattctctaagtctataatacttcattaagatacaaaataatccaaaaattttgattttatcattattatactgtttagtgaaaatggatatgacacttagtatagattcgctatattcgacttcagggtcaaaacttaagtatgttttaacgacattaaaaactatatctttttgttcctcgttttccgggaagattttctctatatctattttaatttgttcttcatcaaaactactatctttagaaactaacaattcataaattgtattccaattatgagatttcataaatgtaacagattcccaaacttcatttctaagttgaacaggaattgaatttgaagatattatcaacttttcgatagtttcatatctttcatttatagtattttctggatccttaattaattgtttccaaatattcgattcttctgtctcaccattgtccgtaagttcttcgttgtgaggcagtattccatgaggtttatatttatcactcaattttaattcgttgattgtttcattcaatctaaatattaacatatcatctgcaattaatgatctttctgactcaatattattaatttctccatttgacttgtttggatctctgttttgttgtttgttgcgagaaggtaaaatgggtacacttcttcttggtggtagattggggccttcattatctagtatttttgtttcattttgtttagaatctagactatcatcattttcactgatattaacagattctttgcgttcaggtaatggtggagtactaaattgcgacaaagctgaatatattttattagtttctatagctaattgactgttggtttctataggtataggtggtacactttctaattcattaccgttaggctgaactgctgtaatgtttgtttggttatcaatattatctggtgtattaatttcttcaccttttgtatgttgtctacttaagccatctgttagttttattgtttgaggtatcaactccttgctgttagtttttggagaatcttcaggtatatgcgtcaatatttcatgactttcttgctccattgtttaaagtaaattatatatgagtgtgtaattgctaagaagaaaatataatagaaatttatatatttcaaaaagttctaatatacctggttttacttagttaagtgttaatcgtttgaagaataaagtttgtaatgcggtagtctaagtctatcaatcagtcttattcaaatcctttgttttattttcttcctagtcctccctctatttttattttttattttcgaattttcaaataatgaaataatttcacttcctgatctaccataatatcacataacaacctccttcctgagaacctaaaaatacatatatgtaagataactaatattatttttcgatgttgaatttatatttatcgctagcatctaagttataccattcaacttatgtgatggcatcagaattacaaacaaaattgagctaatattgaatatatagatgttctttaatagaaatatataaacttaattatattttaatttaatgcaattgatctgtaactgtaaacgttaactttaggtttgaattaataaaacgttattttcttttttctttttaataagagaaactaaaatgaaactatgctagtatattttgtattcccacttagttgggattaaatttaagagactatactgattcttgggaaaggatgggtgataacgaatttaggaggactatatcgctgtcaatggaatcaaagcttccattacatgaagaagacaatatatcatcttcattattataactatcacaactactattgattttattattggtttgataaaaattctgtctttgatttactttaaaagagattctattaatattggaacattcatatattgtaccttcttttattttcaagtcagaaactagaattctagtgactctaagtgtcatgttaggaaaatatatcctcagctgattatccccacttatgtgttgacgatattcaattggtaaatagccacaacttctaaatatctttttaacatttaagtgtagtttatttattgacttcatagctgattgtaaatgaataagcaagtcttcatttgaaataattaaattctgttcgtttgtatatatcatgccaattttgggtattataaattcaataaatgattctgattgtggagtatgtgtataatcatttttatattccagaggctttaaatatttcatgttatgaggagagagatataatgaatataaatagtctagtaattggttgatgataactttactataggatttatgttgataaaataatggtatgttgaagatatgcatcctttgaataactgatccactataaaaaccaagggcaactatcttattcaattgtaacttacatataacattaaagggaatatttcttttaacgatacttggtttagtgttcaaaaaattggatagattcgacttccaatttaaagcagtgatactattagataaacaatttaatttggggtataaacaagttaaatgaaataatgacaagtatttagctggagtcgtttggaatttaggaaggaccttgtttatgccactaaatttactatttttatgactaaaataagcacctcgatattcattactaagcaaatataaccaacggatgtagaattggttattgtctactgcaggtttgaaatgagttagtgcaggccacatcttatattttaaatagatatgctaagtttgttatttattttacacgcaaaaagtgtattaggatttacaagttcaaaatttaaaatatattgcaaatcgtctgacttcctacttatatgatttaccttttatgtaacttttgcaaggtatctagttgtctggagttattatttgtgtctaaatatatacatgtatattcattatttctgtgtgcttgttgtttgtgtattttcaatgttgttattttttgtttatttcattaaaggacaagtatggatgacgtcataagttcccttctttttctgagtgattacgttatcttagtcattaatgattatgtcatcagtaaaatcagatacaaaaatgaaatccgtaaacaaaaaaaaataaataaataaataaaaatgttaagtgaaaataaagatgagatcttcaaaaaaaagagcaaaattggaaatagaatccttaaacacgtggtgttttaattcatctttccatgtaacaaaactgttaacaattggcactataagatatgttgattgtgcatagtatatttttatacatacatcattttttgcagtaaaaatatataataatagcaagtcttcacagtgttgaagatggtgagaaagccatcacacaatttaagaagagaacataaatggttcaaagagaataattcattcaaacaagacacagatttagtcttgcaaataattaataaacaataccctcaaaataagaggcaaaaggtagattcacaatatgatactccagttttgtcaggccctttaccaacgcgccgatcctctacagtttttgatgttcagtctcctctttctccccctgctattgctggtactaatattgttagacttccgaataagtgtataaatagtggagataatattaggaaatctgcaataaataaagataataagcaagacataaataaacggctatgtgtgaaaaatttagaatcgcaaggtcatttactaaagaataatattttgccatcctcgttacctattcacaacaactatgaagcttcaaaaaatgctttgaattcaaatgaaggaagtattgttaaaacaaatataccatcctctatatcaaatccaattattcactccaaagatagattaatagatttccaaagtaaactaataaaattgctaaatgctgaaattgacttattgacagaaaaatgtgatattatggtatctacatccctttcagaggattctaaaaaattacaaatatctgaaaaaattataccatctatgaaagtattacaacaaaaaattaaggagcaagaatctaaaattgaaagcattaaaggtattattgatattcaaaataatacaacaagaatacaaagaacctatactgagtctactttatcgcatagtaattcaatatttgccaaaacaaatgctaatgtatccaaaaatacaagtaattcaaatatttcattacctacgccggaagagatgcaactacaaggaaaagaaacattttgtgaaactgacaataatagggatgatataataagactatctggagatgaagattatgacgacaatgtgataaatgattatgaagataacataaataaggatattccgtatgacacaagtgttgttgttgaatctacccttgcagaaggaccacaaggatcactaccaatttctaaaagacgattacgaaacagagcaccagttaattatcgtataccagaaaaagatgatccttttgattacagagttggacgtaaagataaagtacttagtcaatacgagccacaatctgaaaatgaatcagtagatgctgagtttgacaatcaatccgactatttatcaacaagagaagaagaacgtatagaaaatgaaaagttgcacaaaagtgatatcgattttattgtagatgatgatgctgatattataatggatactcaacaagaaaaattatccactaagaataaagatgtagagattattctatcatcccctataagggctgactcacattacgtggaacagatagatcttattgatgacaatgatattcttttagaaagtgaaggtttattaaataattttgcggattctaataaaatagattcggttggtcaatctaataattctgaattaagtaatactaatcaggcttatcctcggctatatacaccaaacgaacttagaaatagtgataatgatgattcagattttgatctcgaggatagtgatcttgaaaatttcgatacagaaagagagaatcggttagtaggtaccaatatgaaagatgttgatgaagagttaaagattatttcagaaagaaaattggatgaagaagaaagtcaagctgctttacaatttttaaataatattaaaaaggaacatatgattgttgatgatcttgatgaactagatgatatatcattggcagacattcacactgatcagaaatataaaacaaccgaaaataataatagcgagccttggtcttcagaagtttaccaaaaattacatgacgttttcaagttaccaggttttaggtcgaatcaggaagaggcaattaatgctacattatctggtagagatgtatttgtattgatgccaaccggtggtggtaaatcactttgctatcaattaccagcaattgtaaattctggatcaacacatggtactacagttgttatttctccattaatttcattgatgcaagatcagatagaacatcttttaagtaaaaacatcaaagccagtatgtttagttcaaaaggtactgcagatgaaagaagacaaacctttaatctatttattcatggtttgcttgatattatatatatatctccagaaatgattagtgcatcgcaacaatgtaaaagagccattcagaaattgtatgaaaataaaaaattggctagagtagttgttgacgaggcacattgtgtttccaattggggccatgactttcgtccagattataaggaattgaaaatatttaaaagagaatatccagatataccgatgatggcactaactgcaacagccagtaagcaagtcattatggatataattcacaatttagaattaaacaatccagttttcttaaaacagagtttcaatagaacaaatttattttatgaagttagaaaaaaaagtaagaacagtattaaagagattgtaacagagattaaatcaaaattcagaaatcaaacaggtataatatattgtcattcaaaaaaatcttgtgaacagactgcaacagcattacagaaatttggaattaggtgtgcatactatcatgctggtatggaaccagaggatagattgaatgttcagaaagcttggcagttagatcaaataaaggtcatttgtgcgactgttgcttttgggatggggattgataaagcagacgtcaggtttgtgtatcattttacagtccctcgtactttggaaggttattatcaagaaacaggtcgtgcaggtagagatggtaacttttcttattgtacaacatatttttctttcagagatataatgacgatacaaactatgatccataaggatgaaaatttggacaaggaaaataaagaaaagcatttagaaaagttgcaacaagttttagcatattgtgataacataactgattgcagaagaaaacttgttttatcatactttaacgaagattttgattctaagctatgtaataagaattgtgataattgtaaaaataatgtagcagcaacaagggaagaacgagatgttacagaaattgctaaacaatttgctagtatggttgatgctttgggacatgggcggataacattaatccatttccaagatatttttaagggttctagaagctcgaagataatccattctgcacatgataagttaccatttcatggagttggtagtaaacttacaaaatcatatatagaaagattagcgtttagattgataacactacatgttattgaggaatactcgatcatgaacaataaagggtttgcaacaaattatgttcgaaaaggacctaatttcagaaagcttatgcataatcaattacagattaagatggatttcactacacctaagaattcaagaccttccaccgttgaatcatctacacacaaaaataaacctctaagtaatgaatctgggaaaggaatgtctaataattcatttaatacagtagaacatattagatcttttacatatcatgaggagtctaacaaaggaataggtccaatacaacctatttccctacaacgaaattttgaagtcagatctactcaagacatgatggaactttcacacgcatataataagttgaaagatgtctgtcgaaaatgtgctcttcagatgaatccaccggtatctgtgtttttaccggatcatataattagagagatagctatgcatctaccagtttctgaagaagagttttgtagctttcctaatgttgctaccatacacaaaaggaaatttaaatttctgaaaccaactatcatggaactaagaaagagaagaattaggaatattggttcttctcaggtaggagttgctttaggtgattctagtactctacctgattttgatttagtagcagacaagactgcttcaaaatactttagttctgataatagaaagcgatgaatactggataaatggcaaaaattcatcaattgttaaaccttgaaatgaaacttatatgatcaacataatatttaaaaaattagatccctgaaagaaaaccatcaattctttttgggttctattctttttttttttcatgtattagatataaagtgattcatataaatataaaatattcattatatagctaccacaattcacattaaataggatattactaatttattcattcttcgctaacttcttccacagttggacaagtacacattaaatttaagtcaccatatgtatcatttaatcttgtgacaacaggccagaatttattatatttcaagtaaggtagtggatatgcagccaattctctggagtaacctctcgtgtcccagtcttttgaagaaataatatcttctaaggaatgtggagcattcttcaagacattacctttaccttcacctgcaatgaaagcgtcaatttcacctttaatagagatcattgcatccacgaatctatccaattcttccaaattttctgattctgttggttcaaccattaaagttccggggactggaaaagctaatgttggagcatggaacccataatcttgtaatctcttggcaatatcaatagcttcgatatgcttttctttgtattctcttaaatcaatgataaattcatgagcacaataatcaataccattttctttattgacgaagaggattttgtagtattcttgcaaacgagttcttatgtagttggcatttaacatggccataatactggcaaatggtaaacctttatttcctagcatcttgataaatgtataggagatgggtaatactagtgcattaccatatgtggcagaagaaacacttgagatcgatttggaggtagctgtggttggtggtgcaatagagtgggttggtaggaatggagttaaatgtttacgaacaccaatagcaccaatacctggaccaccaccaccatgtggaatagcaaaagtcttgtgaagattcaaatgacaaacgtcggcacctaagaaacctggcgaagtaagacctaattgggcattcatattggcaccgtctaaatagacttgaccaccgtaagtatgaacaatatcaattgcatctttaactccaggttcatataaaccgtaagtagatgggtatgtgatcatgatagcagctaaattatccttgtatttctctgctttagcttttaaatcaattaaatcaagtgatccatttggaagacatgctacagaaacgactttcaatccgcacatagcagcggatgcagggttggtaccatgtgcagacactgggatcaagcagacattacgatgagattgtccaatatctccaagataggccttaataacacgtaaaccagtatattcaccttgagcaccagagtttggttgcaaagatacagcatcaaaagatgttatgcttgccaagtctttttctaaagactccaccatttcttggaaacccttaacttgatctgcgggttggaaaggatgaaggttggtaaattgtggccaagatatcggcatcatttcaattgtactattcaatttcatagtacatgaacctaatggaatcatagagttggctaaagataagtctcttgattgtagacgatgtaaatatcttaacattgcagtttcactgtgatgcttattaaacacctcttgttgtaaaatatcatcagtacgctgaataccttcagataattcagggatttgatcgaaattaacttctataagtttatcttcattgaacaatttaattaagcttttaatatcttcgatagtaacagtttcatcaatggataaagaaacagaatgagaactattcgaataaatatttatgttatacttttctaaagctaactttaagaactggggtgaagtatatttgtcatttaattctatagttaaagtatcaaaccatgtctcattggttactctatgaataccgctctttttgatagtattggctaagattgtggttaatccataaattcttcttgcaatatttttaattccttcaggaccatgatagactacatagttggcagcaatattagccagtaatgcttgggcagtacagatattagaggtagccttatcacgtttaatatgttgttctctagtttgtaaagccaatcttaaagctggtttatttaatctatctttggaaacacccacaattctgccgggaatttttctatttagtttatttgatacagcaaaataagctgcatgcggtccacccatccccataggaacaccaaacctttgtgtagaaccaagtgcaatatcagcattaaattcagatggcggctttaaaagagtcaaagccattatatctgcaatcatagtgaaggtatttttctttgaatgcaatagatcagaaatcttagttaaagtttcatttgctattatagaaccatcggttgctggatattgaaccatacacccaaacacctgtgagtcatttgctagaattgggccaacttcgttccaattgtagcaatcaacttcaattaactcgatattaaatggtctacaccttgtccttaagacatcctttgtctgctgatgtaaccttttgtcaattatatatttggttttctttcttttatgtatattgaaggacaataaaagagcttctccagcagctgtaccctcatctaataaagatgcattggcaacaggtaatccggttaattcagagataacagtttggaaatttagtaaggattctaatctaccttgtgaaatttcaggttgatatggggtataagaagtgtaccactcaggcgactctaagatgtttctttgaattactggaggtaagatagtaccataataacctttcccaattaaatttttaaccttatagttatttttattagccaatgttgcaatatgatttaacattgcttgttcagtataaccatcttgtggagcatctaaagtcaagggttttaattgtagaatttgcggtggaatcacagcatgtacaaattcagataagtctttaaaacccatagtttgtaacatttttttaatatcatttggtgaaggacctatatgacgccttaggaatgtgtcaagtggtttttttaaattaagtttgacatcatttttatttatatacccctgatataattcagcgtattggtttgaacttatatcagtattttcttgtttagatgatatagaacttttaataaagtatctttttgaagttattgagactcttttggtgaattgtggtatgattattcttgaagtaaatgatacttttgatcttaacataattgataaagaaatataaaagataaaagaaaaagtaaataagtagtgaataatatgtgaatatatgtataatagtaataatattaaagataatagttgcggatgattttcacttatatagaatagaatcaaattaattcctcgtggtttgataatttgggagtcactaaataatatagaaaattaaatgacagtaaccttaagttcaagtatgacaaacgttgatacgttgataaaagagttttaagaaaatgaatatagtatgtagaacgaattatttatgcgggagaaacatataaattatcagcaatattaatatatgtatatatgaatgtttgaatggaattataatattttgtttctatataaaagttttcttgttttataattgataaagtatcattcaaatttttgttatcaagattattaaataagagaagaagtggagattagttgatgaataaacgagaaaaaaataaaagtgtaaatagaacaggtgaaaagaatattgataagttttgattctaataatatcattaaattaatggttcaaggcatagaaaacatgatttaattactatgttcattttctttgtttttttttcttttgtctcatttcttcattcagacctacttctatatacattctcatgatacttccttttatgacaagtggtcaatattaacaataacggtggtgatattgatagcatccaagcatttcgtttgtttaattggttctaaataataaaaaaaaaagtaaacaaaaacagcccaaaagaatcgtaaaggtaaacagtggaagatatttgttctgcagaatatttagaatgtgtattctaccatcattattattggatatttgataaaatggaataatgatctttaacaatttggttgctgtaatttaattgctgtctattgacaggtatgccatagtaaatgactgttcctttggaccgatttgacttcctccactttgaatcacttcagtcttcactttgaatgactccggcaggcaaaaagcaaaagataaaaaccagagtctaatactgacttccaccggggttaggaccgagtcaaacacgagattcttagggtaggtttttatagattggaaaaagtttaaaagtttatatagggtttagattaactttttcgttaatattccaaagtttttctttcccaagaaaagaaagagataactaaaagaacaaaataaaatgaacaatgatttttaatcctccttacaatcatcgagaatatattcaaacagaaagcgaacgcaaacacgttgcaagacttaagataaattgattccaacctgatcagattatttaattgtgtctgattgtttgtccataagaagcaaatattgttatagaggagcgaaaaagaggaaataaaaagatagattatggcaagacaaaatttcgttggtattgttgtatcccaagggaagatgcaaaaaactgttaaagtacgggttgaaagaagagttttcaataagaagattaataaagaattgttgaatcgtaaagattacttggttcatgatgaaaatgaaatatccaaagaaggtgatatggttcgtattgaggccactcgaccattatccaaaaggaaagcatttgccattgccgagattttaaaaaataaaggtcaacaatttgcacattttgaaactatggcaaaaacggatgttttaaaagaagaagctattaaatctaaggaattcttagatagaagggccaaacaaaaagaaagtgatagcaatatgattaaagatattcgatccttacaattgatttataatcaaaataaaaatggagtggaactatctccagagagtagcaaagaattgaaaagaattaaggataaatatggtattcaagaattttctccagattcattaaagaaattactaaatttgaatttattggctattgaatcagatctagaaaaacagagagctaaaattgaaaccattcagaaaaatttggcaattttattgaaggatgagccaaaggcttttgaatttcttcaaaagcatggtgttgaaaatccaagctcattgcaaaaaaatattagaaaaaatttgattagaaaatacttatttaaggaaatacaattatgatatgttgtgatggggaaggaatgttaagaggttattaagagacagaaaaattatactacatcattatataaaaatattcaatcatgtatatatttcaaccttttcattaaaaaaaataaaaataaaaataaaaataaaaataaaaataacaagtttcttgtccaaagaaatattcaaaagtcattgcatagtaatatgattatctatttattatttgtatatcccaagaagaaagtagaaataatactattcttccagctcaaattatatttgttttgatgatagtatacaaaaataaaggaattattttttgaagtattttttttgtaggaatttatttttttttttgtattttggatttgcccgaaaagctggcgttcgatccaactttgatgcttttattttaactttttttagagatttgtagggtcagccaaatgtatctacaaataaagtaatgtatctataaagcaaatctgaagaatatttatgaattattggttcgaaagaatatttgtaaatatatacatatcttgaataacttatatatgagtgaggaagttttataaagttaagatcattatagatgtaccacaaaaaattgtaacggttattaaatttatgaatgaaaatttgatgtaattcatttaattcatatgattgttttgtgtatagaataatagcaataattaaacgtaaaggattttaagatagaagcaaaaaataaaaaaaaaaaaatacacgtatatacatccttaaatcatgctgttatcggcaattatacgaagaaaagtttataaagatccatacacatgttgggtgtgtctagacgaagaaacagatatgtcaaaacataaaaatgaatggattttccacacatgtaattgtaatcttcaaattcataagaattgttatttaaagcttcattacaataatattcaaaagcaatttgtatatatatcaatagaacaaaatgaagaaacaatatacagtgatttgctaagaggaagtttatgttcatatatttattataatggtaatcaccactccttttatttgccatatagttcatatttgttaaactcagtgacaatcaaaaagatgttgttgtttcttaagaacacactaaaacaatatttatttggtccaaacttacttggtgattcaaaaggttttttattccaggatagcatgccttttgatgagttgaaaaaaaaacttcctgagatgttcaagataacatctggaccaaacgaattatgtccacaatgtcgtaaagatattatatccagtataaagatgaatattatatcacaatcatatatttattatatgtacgatcaggtcttgaattatgttgaaggggttttctttatacctttgtctttcatatttctagcaaacccattggcatgtttattagaaattggattgtggcaatttcgttgcattttcccagaatcacaattaagatatattttaaatattgaaactacaaaaagtttagatgtatattttaaaagttttaagggaatatctagtattgtcaatgaaaataaatttattattattggcttaccgatatatttattttccatagttaagaacacattttttcaatggcctgttatcgacatgatatcttactactggatgcgttgtataggttttagacttattagttatcaagagcatggggttaatttgcaactattaaaaaaatgttttaaatatacagattggttggtttggggttattgtatgttagataaatatatttataaatatattacaccaaagtacattaaacaatcgattaaagaagatgcaacagatataagggatagaaagattaaatttagcaaatattttgttcgacttgatgaaggctactctttccagttaactaaagcttttgtatggccatggttaggtaaatgggcaggtaaattaatcagcctgacatatgttaatgtcaaaagatattttaatttaagagatatagatatagtgccagggttttatgcatctccagatgaatatgagatgattttcaatttattgggaatgggcataattggattatcaggatcgatattaagttggacgtcatggaaaaacagatatgagcgaaggctaaaaactgaggcattagctgataagatagtaaaagaataattgaaacaattagtcatgagaatgattaaacattattaccatttcaataaatttttgctgtataaatagatagacatttaattgtttctaatacttattgcatattatgcatctacacaacaatgcagacaacccaagcaaaaggaaacataaataatcttttaaattttattaaatatttattactatttttatgggagtatatataatttaatgcatacaaaagtggaatttataaataatactatttagttatgaataaaaaatatgtattacactctttctttttctattaattaaaaaaaaaaatgtattcatgtagcgaagaaacatattaaaaagttgattttttgttattgctatcgttatccttagtcaacttcttccatttcagtgtcagcactgacttcttcagatggcttttctggagcagcttcagcatcttgagtttcttcttcttcatcgtcaatattcaaacctagggaaattaatctgttaattctagcagcaaaagaagttggctcatctagagtgaatccagaggttaatagagcagtttcgtacaacaagttggtcaagtccttaacagtcttatcttgagcaccaccttcttcgactctcttctttaattccttaataattggggattttggagagatttcgaaagtcttcttagaggacatgtatgcagacatagtagtgtcccttaaagcttgagctttcataattctttccatgttagcagaccaaccgaattgaccagttctaatagcggctggagcatcgaccaacttgtaagaaacaacgaccttttcgacttggtcacctaagatttccttcaaggccttggttaatggttcgaattccttgatttccttttctctttcagccttttcttcttcagtttcttccaattcaaagtccttggtaatatcgactaaagtcttaccttcgaattcctttaattgagtgaaggcatattcgtcaattgggtcaactaagaataagacttcaaagtccttagccttcaaagcatctaagaatggggatttttcaacagcctttatggattcaccagtgatgaagtagatgttcttttgatgttctggcattctagtaacatagtcacctaaggaagtcatttcatcagtagacttagtggagtagtatcttaataacttagccaaagcagctctgttttgagcatcttcatggatacccaacttgatgtttttagagaaggcagagtagaatttgtcgaattgttcggaatcttcagcaatttcattgaaggattcaattaacttcttgatgatgttcttcttgatgaccttcatgatcttgttttgttgtaacatttctctggataagtttaatggtaaatcttcggaatcaacaacacctctaacgaaggataaccattctggaatcaagtcttcagcttcatcagtgatgaaaacacgacggacatataacttaatgttgttcttcttcttcttagtttcaaatagatccattggagctctctttggaatgaataagatggctctgaattctaattgaccttcaacggagaagtgtttgacgtataatgggtcttcccagtcgttggagatggacttgtagaaagcgttgtattcctcttgggtaatttcagatgggtttcttgtccataatggcttagtcttgtttaattcttctagttcttggacttgttccttaactttcttggtctttttttcgtccttcttttcttcttcatcttcgttgacttcttctaattttggttttttgtcgtcttccttttcatctttcttttcttcttcatcttccacgattggaacctccttttcaacttccttagtgactaataattggattggataagcgacgaattcagaatgtctcttaacgacttccttaattcttttttcttctaagtattctagttggtcttcctttaagaataatctaatgatagaacctctaccgattctttcgttgacttcatccaaagtgacagtgaaagaaccaccagcgttagattcccagatgtattgttcatcgtcattgttcttggaaatgacttgaactctatcagcgactaagaataaagagtagaaaccgacaccgaattgaccgatcatggaaacatcggcaccagcagataaggcttccatgaaagctttagtaccagacttagcgatagtacccaagttgttgattaattcagccttggtcataccaataccagaatctctaatttctaagattttgtcttctggttttggagtaattctaatgaacaactctggttcagtttctaattgttttggatcacttaaagccttgtatctaattttatctaaggcatcggaggcattagagatcaattctcttaagaaaatttctttgttggaatagacagtgttaatgattaaactcattaactgagtaatttcagcttgaaattcaaaagtttcactagccattgttgagtgtgttcaatggatgtatatgtatatataatattatcttaataatccgggttgatatatccctggtatgatatcaaggttgactgattgggaaaggggacaaaaggaacattacaaggaaaaagaacctttaaatgcgtattggaggaaaacgagggtaaagaagagaaaactggcgtccatggggatttctttaaccttcagtacttatatactctacgttgtcagatactgcaggtcttatttagcctaaaaagaaaaattaaaaagcgggtaaagaaaatcgaaccttttggaaccttttggaataaaaaaaaaacgaaaaaacgaaaaacaagattttctcctttatttttttccttttctcctttttttttgtttcttttttttttttttttggttctaaaaaattccaaaaagttcgatttttttttcccttccccccctgttttgttttttttttttgtaatttttttttttattttctattttgctttgatcttaagattttcttctagagatttctagaagaattttggtatttcttatagttttttttatccattaatctctttttttttttttttccttttttgctactagaatcatttctttaaagttaatccaagttagctgggtgtttagaaaaagacgtgtggttgaccatccaagatacataatggtggaacaatgcttgtagtagaaaactatatggatatagtaatattacattagaaatatgctagcaatataatgtccaatttgtcatttatatatattgctaagctttaataatataaacatagacaggtccatatataaaaataatgttttacaaagttcctttctttctttttttttcttttatcttttcctcctgcctttatttgtatcctcttgttaagtgtcttcagttaagttccgacaattgtgtaacaacatctgaaacatggaacttctctaatatatctagtaattgattgatttgttcacatacaagataatcatcatcatgcatctttgtatattctaatagagtcttgattcgtgctaaattatattccttaggaaaaagtgtcatatcagcattgtaaagtaaatcatgtattaaatgaactgcacttcttctcataacaaatgaagtcgatgatttatttttctctctagtgttattactgctttcaagggttaatacaccaaacacgcaatctaatatctctctgattctatctcttatacctaacgcattaacttgtaaacatacaccaagtattgacattgcagacattcttaatctattatccaatttgtcatgttgacgtaccttgtttaaacatatatcaattattttatttgcatactccccttgaaacaatttattctctctttgaatataattcactataacttcacctgtcctcaaaatttcatcgactttatattttttattctcatttgaataaaaaattaatatcagtgtcaacgtttctattggtgatatttccactaattcagttaatcctttgattgcatttaagtatacaaatggatctaaattttttaaattttgtaaatggattcgaactaccctatctaccgatataactgtggaattatctttaattaattgtcttagttctgttaatccatgcactctaatgggtgctaaattatcacttagatttattaatgctctatttagtatttctttatcattccttaattgactagactctttgctaataggaagcagcgatgcagatgctggcaattgatttcttgaaacatattcttggattttgtctttaacatcagatatagatcttaactgatcattatctgttgtttgtagacatgctaatttcttttcaatttcaagtaacaaagtagtaaattctttatctctatttcctccattttgtgatagtaaatcggatactattagttccaaaagttctgtaactatttgtaatgaaataattgggatcttttttatctctaaattagattctatcttcttgtcttcgtcttcatcttcatcatcggaatctctttcatcactgttcattagtaaagatttgctatcttcttccaacatcccctcaacgttaatgaaatctaataatttagttatcattagaagaacatcttttttattagttactaaatccgttttgaaatcctcatttatcttctgcaaaatctttaagtcaagaataatcaataaattcttgcttagattgtctttattggccatactactatcatttgcatccttttctttattttgatcattgttagtattaaaattggaatttattgccctcgatgaatctgttgagatatactgtatccatctagataatatagataaaaatgacctggttattatttctggattattgattaaatgtaataacttcacatataactcaatagcaaggtccatatccttgaataattgtgatacagtctccactcggttttcaggtgtttttgtaaggtttttgataatattactattttcctcatatattttattatttttgattttgacatacggtaattgggtctctaaatctatacaataagcccagtcgtcatgatcaaaatttaataaatttaaattgatcttttcaagtatggaataattatttgtaatgataataaaagtttgtaataatgataaaataacctcatagtatgggacattattttccttttgaaaattgttagcaattattggatccactttttgatacttcagcaaaaataaacaatatatccaaatgtttaagtagaatcctctttcatcaaacccagtagttaaatcaatgatcaaatctgttgacacatttttagataatgatataagaacattaaacatatcatttaattccttaatactacgattttgaacaggataattaaataatattttatagatttttttaaataaaaaatctcttatgatctttttattcttgtagaaaaattcagtggtgatcccatttaaacaagttatcagtatgggtctattaacaaaagtcattccatcatatatttgatcgaatattttggttaaatactccttatttgaaatattctttggtttggataagactatcttattcacacgttgaattttttcgttatcgatttgttcatcttctctaacaccaagtacaaaatcaattagagttataagcccatttgtctctcttcgtattggtaaagtcgtcaattcgtccaatataaataattttgcttcagttagttgtatacattgagttagaaacgtatacaaagtgaataatgaatacgtatcttgacagtcttccaccttatttaatttggataaaatttcagaatcttcaggatatgatatatgtaattgtagaaatcctaaatacaagtttgtatatagagggccctttataatcacagatcttaaataatcatttctgttggtaatgtgactattggcttcattttccctatcagttaagtaattttctttcgttaaattatttgtttcacatgttataactccatatagaaacatcagaacatttcttagtatattggaatctggagtatgttctttcggtatcattaacgttttgtcatcatttttaaatgatttcaatcttcttaattctagtggtatacgtaatttgggtattaaattagcgtcaattccatgaacgattagaagtgcaaacaattgatccatgtatttcatatcatgtaatgatataggcaataaattatttttatctttaattaaatcattttgtctctgtataattaaaagatgtaattttttaattttggttaataaataatcaacaaaggatttgttatctaaaaatcctaaatatgcatataaagaaccttggttagaagattcatcatttgtaaataagaaaagttttgcgattaactcgttctctaagtcagtaaaaaaattgtctaatggtgtatctaaggcaaaatcgggtcccttagtaataatattccttaaatttgattttccttcgttcatgtaatctttaagaagtaatatttgaaagtgacaatatgagttgcataaattttttttctctgtgaagtacctttaagttattataattgaaaaaaatggcaacaacaaaatatatagctatgtatatacaggatttgtgtatgtatgtgtatatatttccttttttcttaatgtacttaaatttttttttctaatttggtttaaaactcttttattttttataagatatattattattactatttttcgaaattaaatggatgatattgtatagtagacggggtacataaaagaaagatagactaatagtttaaagggtagaggtacatatgcaaaagtaactttaaatacagagtgcatatataagaatatgtacaaatatgtctgttaattgtctatattttcaattaatttgaggaaagatggacaccagctacttattgtaatatccattgccatccattttctaagatagtcagcctgcttaattctatcatcccctatttctaagaagtgcaagagggatgttttagtagaagcattattaatacttttaggaagattgaggtcaacctttcttttgtaaaaatggtattctttatctgataatttagaacatttattcatcagttcactaattttcttcaaaatctcatcatcatttaatatttcatttgaattatctgaggaattgtttttaccattaatttcagaattactcggattattgttgtcagtcattgccaatctttttttagtagacagtggtggtggagtcacaggtaatttagtactaccatatgtatcctttacaacataatgcaattggtttcttctgccactcttttttgatatattaaacaaaaaactaggacagtcattatatccaggtatatctgtttctttacaattttgaaaacttctgtttcttcttggtaatgtagtgtctgtcatgattgtttaaaagtggtaaatgttggaagcgaccttaattaatcgtttatttatactttctagatttataactttgatgatgttttagtttattcttacttaatgctgtgagatctcagactaatgaatgtcaaatgtggtttttatatatctgaatcaagaaatttttaattaagatctgcctatcttcgaaatttgttgaagctcttattcagatcttaatgatgtgtaggagaaagtgaacctttttagcagggaagtctggtgttggacgcttttgaaagaaagaaaacagggagagaagacaaaattttggtggggtttttttttggacaaaattttttttttttactataaagtgttatttgatttaaaaatcgcaattaccttatctaaaaatcaagcgtcgctttcctttttgggacatgccttttagagcctttttccttttttatttttgtttcgttcaacaaatgaatcttcatctgtatttatatagaaaaggatgggcaaattgagatggcactactgtcaaaagggagtcaatttacttaaaccattattattgaaagtctcaaacaacttttcagataaaaatatagatattataagttatttctagctttgtatgtgggaatttaggattgttattgactgaatttttcttcattttgcagaaattactaggaaaaagattatttcctcttcttttaatggaatttgccggtgattaaaacgtttatttttttctttccttcttattagtatattttcttttttattcgatacctatatattctcttctattagtgaattattgaaatcatttgtttttagaggtgtacatagatattagaagaataaagcttcattacaaatatatatctctaaaatatacaccacagatattgcaaaattttgatatcctgggtagaatgattttctttattgaaaaagtgacttttttttgattataaatgcacttgtgtttaataactatttggatagcttttggcggaaatgatggttttttagaataaactgcattgaatttttaaattacacttttcaaatatttgtatgcagatatgtgcaggaaccatagtcattctatccaagcataacaaataagaagtcaaaatataaattttatagatatatgcaggttctcctcataatagtgaatccagacagaataaggaattattaaattagatgaaagattatttgtattgcaattagttattacatcaaatattcaaagttttataacctcgtataattttttcttctttgtagaaatttttttgtgtataaatagaataagtttgattgatttttcctaaattcatgattttggtttttcaaaatatctgatatgatatttctgggcaagcctaaaatagtagttagtcgaatttttaagatatattgtttacatttatttgtccaaaaatagtaataacattgttaattggagtagagagaagggagtctattattctataagtttttggtagttgtttaaataatttttagcaggtttgggtaatttttgggtaaatgaagtagtaaaatactatacgttaaagtataagtttttttattaagtttaatacattatgtatagaaatataatctatacatcatttaggtatgtaaggaaaacactttttaggttacctagtatctgtctttcattcaaaaaaataaatatgtttaagatatataaaatagtcggaataaacgtctaattttttaacatccatattaatatgggggactttggtgaaatcaaatagacaattacaatattaaaagaaaaaatttagattaggacttctttggaatctatgtaagggatgatcatatatctaaaaatagttatattcaagaaagagtcaaacgtttaaatcaattttttatgtattaaaaatggtatattggaaaatagacaatgagaaaaaaggttgatagagataggttttgtaatagtatcattacattattatggaatcttggtctgtacatacgtaaaccaaaataacttatatcgtattaaatattagtctctattgaaattattttgtataaaatcgccgttttgccataaaagagttgtaggtatagaagtattgtaccaatatttataattaaatgtctttttgtttacttaaaaataagatttataactattccgaaaaagtttatatctgtaataataaacaaaaaatataaatttttatttttgaaaaaagttttttaagtgtctttgtaaaacctatatcaatagatacatttaactattttcttttttctttttctcttcctttcctttccttttctttttttttaagattagattaacattttcaaatttatgcaccatttctttttttggtgtaataatttggcaatagaaaattttgcaaagaaacgcaatattagaatatgaaatcgaacgtgagacaacaatgcacatcttttattaataaagacaaattttgaattttaatgagaaattgctacagttttttgggtagtaaaacctaaaagcataatcactaaaacccttcgcgtacaaaatttcaagagaaaatcaaatacatttcgtcaaggttttgaaattaaaatgaaaacaatacgaaaacaaattagcaagaatgagaaaccttattcagatttaaatcatatctggtcatgttaaccatttgttttatttttaaaaaaagactattatttaaccggtatattatccaaaatcgaaaacataaaacaataaaacaccaacaaaagcctattttttagattgtatgcgcaagaatagccagagttctgacccagtttacaatatattcaatttttttaaccttttcctcattaaagagatctaatattaaacaatagtaggttcctcttttaaactttcgcccgtattgtctttttttttataaaaagttcactatgttatttttctaatcttgtatacaactttacattgtattctcttctagaaaaatgcataaatacgaggtccaagtaaataaagtttgtgtatttgaataatattggaaatttttatggaattattgtttatttttttgttgcttgaagaccacaatatatttctattattcttttttaattttacaacattattgtgtaatagaaattatggctaaaatttagttcagctattgaataacataccacataactaaaccaattttgttataacaataacattctattgttacattcttaaatcataccaataacctttttactttatttttgaattgaaccctggaatttctattatttaaaaattccagacttatgaaaagaaaatagaacgaaaacaatatcagaaaaaaaaatatgaaaaaaaaagttgtccgcattaaattttaaggaggtgaaaaaaaaaaataaaaaaaaatcacgggctttttaacatatggaatttaattttttttaccagcctaacatgtagctagggttttatatgaaggccaattgtgtaatagtacacacagaaacacttttctgtcccccctccctcttaaaactttattccaatattgtgactgtaatttttccttgattgtcataaaaataaaattttttctaacaggatgtattatcaatgcaaatttacatagtattaaaacatcatattgtcttgatttgagaatggtctttatcgtgcaaatctaatatcattcttagggtttataatatttaaattttttaatttttggtactttcaatatatgatgagggtaaaaatttatttacaaaaaaacattatttttcttaaaaagaaaaaaaaattactagaaaaaatttattctctaagcgaataataactcatttttttcaaaaaagaaaacataaaaacaaaagaaattttcatatccctcttattctttttccaaaacaatagcatatatattgtgttatataattttaagttttaaagtttaaacggagttaacattctcgtgatttcactcaccaaaaatgttatttttttatgaaaaatctctataatcaatgaccatcggtttcttttttctacagtatgtaacttaaaccaaaaatttttattattctaaacaatacttcagttctttctttttttttttctctctcaataatatttggtaaagaaatgttaccagatatattcatatccagtattttttctcttaacctttcttttttttttttttcatcttgctttatttttagtcaaacaataacataaatttcacagcaacattattattcttattctctaaaaaaattattgttttatttttcaccttgtccttttaataacaaatttaaaatagatacagatgagagttccgttttcttcaataacaaaacattggttaagcgaagttatatcgttccaataaaaggaaaaaaatggagtagggactctttctcgaagatttatctaaaaatactttatttgaaaaaatttttatcgtttttgaattattgttaccaacgaaaccccaagttccaatttattgttagggagcagcaaacaaaactagtttttcaaactttaaatttccataaaagtactatctgcaaccttctttcaaatctcctcctcactttttgtttgagatgctccactcttcaaaagttttgatttttatttatttcttttgtgtttggttactgtatttgtatatactctaaatcttgcctattccaaatatatatatatatattatctatatggaatatgctaaggtcctacttatttttcctacttttcttttattccaactgcagtttgtctattttccctttaatacttctaactcaggaattttttctcaagcattgaaatattaagttacaatcaagatagactgacactagaaaatataccaagcattcagtttgacgtcttcaacaaaaaaattagaaaaataatatcttaatcaagtaagatcattgctatagaaaactagcaaattagctattgtagcataaaaaaaccttttattgttttttttggtaataaatatcctttgaagaagtgactgtaccgctattaatatactatttacttcacctaatgcaatcacttttaaccgacagaatatttttaactctttaaaaagaactttcaggtaaattatattctctaaaacattctcgttttttgaaaatccaaatttccgcaattctttgttttttttacttgaagaacaaataaaggagaaatctagcaaaactatttaacaaaaaacaattacattaataatttctcatggaggaatctgacaagcagaatcatactaacaaggcaaaaaaagacaaaaagaaaaccagaaatgaagtaagagaaaaaatttttaaatgtacaggctatgaagattgtaatatggcatttaatagggctgaacatttggctaggcatataagaaaacatactggtgaaaaaccattccaatgccatatctgtttcaaatactttagtagacctgataacttaaaacaacatagggaaaatgtacattctaaaattgaaaacattacttccatcctcaaatcccaaccaaggatacataatgatcaatttaattatatcaatggcataggggttaataatactggttatctcaaccaagcatattatcaatatccacattatacaaacggtatatattataattatgtcggtgccaataataatatgactatacctaacaatactccagattatttcaatggatatcatccccactttcctgtggatatgtcggatacaaaaatgattcctttttcacggccgcatatggtaactaaaactactgttattgctgataccagtttaaataacaatatcccaaacatttctaacatagaaaatagcaattttcgctctagtagaggtactgaagttagtaataatattcctaaagtaaatcatttgtcaaactcaacagatttgactgataaaaatcacataggtattatttcaaaatctaatatggaccaacaaaattcaaatttcccatctttaggttacagtatttttcctaaagaaaagtccaaacataatccttataattcctacccaataccgacagatggtaaactggtatcccaacagaacaatgttgctgcattaaacaatactacaacaaactataacttttatccatataatataatctctgataattatcaagtaaatcatagttttggtacgaatatgtcccagcctcctacagctggctctgttaagagtatttcaactacaacaccatccagaagccatgataataatgtaaattatatctcaaacagaacaccatgtaataatttgctaccatatcaggcaattttacaacagccaaagactattactgcattgcctgttcagttagagagagaaagaatcgtttccctaccttcaatctatcaagatattgattcaaaggtgaaaatgaatgcacaacaaactaatgaaactaatacaagtattaaccaaaaccaattcacaaatgttccatcttatcttttatcatcactccaaacaatgccatatcaaataggacactcgcatcatcaagcacagtccacaattttgtataatcccattcaaccatcggcagagttagttaacttgaatcataataattctggtattaataatgtattcagtaatttaactattaataataaaagttccaatctaaacaatgatgaaaataaaacttattctacaaagcaaacttttaccaaaaatagtgctactaaaagtagtccttcttctttggattcaaaattgatagttgaatcaaagtcattatcttctttagtttcatctgccacttcacccactattggtaaatgttataaaaacaaaatcaacgaaggaaatgctaatgtttcaggtataaaagataatattttgaaaaataattatcataaaagaaaacttcctgacagatcctcttcttcctctagcggaaatagtaataacaataatagtggtagtagtagtgacaatttatctgatgttaatgaatccaatactcaagatataaaaaacagtatttatgaggacagcgatgaaaagacttcaaataatgaagagtattctaagaaggatggtacatccaaaaggaataaaaagaaaaatgatagtaagcccaagtctaagtccaagtctgcttccaacaaaccttataagaaaagatcaaagaagaaagcagataacaaaaatgagttgggaggatctattacgaatgggtcatttagtagttttgaatcatctgtctttagcactgagacatacgataccactgctggcaaaacaaagggtgaagaaagagaacagaagaaaactacggaaaaaaagcaaaaggacaaattccatgaaagagatactaataagaagaaagacacgcaagttacaaaagatgaacaacatttcgatgatgaagctgatgggtctacttcctcaaggttaagtttagattatattatatcatgaatggaaagccctaatttcagctcattaaaagccctaatctcggatattttacctaattgggatatccgccggaactgcggaatatttgattttctggcttttgttttttcaaaaaagggtacaatagaacaatagagaatatttttatctctgtttctttctcgtttctttttctgattccgttatttttattatttatttatttgttgatttattttgcttgttttgtcatgtgaacttttctatctctgctttttgctttattttcttataaatataatcttaaaatcttctgttattaaacttttcttttctttttatcccattattgatctttacatgttataaataggcatatatacttacgtgttcgcatattcaataactatatgcattaacatcagtagcatagagaaccctttttaacaaatagaacaaagtactagatatctgctatcaaacttttctctaagagatcattttttgccaatttttgaccttcacaataattggttatatattatttatcctttagtgagtcaaacttattaaatttatcatgtctaaagttaaatatatgaactgcataaataattctattccaaatagttatattaaagaatataccaacaatgaactttttaccaaacaaactggttatactccattaacacactaccaacaacagataccaagctctataaatatgttgaatattccattctacccaaataatactaatcctgtatgcggattaaatatggatatacctgttataaatgaacagaatgccataaagaaatttaattcaggtacaacaaggagtgattcaagttcaagttctacatcatcaagtgctatgagttctttatctatgaatcataataaatattataatgaaaatagtttatacgtaaatgactctgatttagatttattagattttaaacatagaaataatttatccaagttatttgaagatgatctcatatattgtccacgctctttgttatcaaaacaggatcttcagagagcgaacatgctattatatgaacaatccctaactcaaaattattttacaaacacttataataagcttactgtagaatcgccttgtttaactacaactaatatgcattcgatgaaattcaatccttatacttctaaaagttttaatcctactttacccctttaacacaaaaatgaatatatttcaaacaggtggatgtatgagagaaatagaataagtgataatctatcactctatctaaatatttttccatttcatatcatgttacccatttatatcaaatattctacttttttttcatttatggtctcacttatcattatattttacctattataaactctattttttttttcttttttttttcgtccccagtctggtcattctaagaattgtttttatttatataatacgaacagtcatattcttttatacaacttgtcatgctcatcaaaatttatattttacatttattttgaaaccatttaactttttcatatttatccattcataattttgttcatctagttattttctaccctctttaatttagtgtatgtatttcatttatatcatcctataatgcgtgtgcaatgcatttatatatcttatataatgtcatgttattatatttttttatgtaaactttttattctaaacagttatattattgacaaaaaagaaaaaaaaagctacatgcatactttgacaaataaaaatgcaccgtaatatgagtatgagttatttaactttaaaatgcaaatatctttatatctataatatccttctttacctaattacatacataacttaattttatttttcatcactagtaaaattaacggtggtagctggtgtgtatataccatcattagaaaaccccatttcattaaaatcactaccaaatttattgttatcatttggtagaacatctaactgatcaagtttactgatgttatccattttatcattattttgattcataaacttagtgaacaaatctggtgtcatatgctcatcatcttcattatcaccatcattctcatctgtttgcggtgaagcagatctatactcaaagatcatacttggagaagaaggtaatattctctgtcttttcttttcttcttcatcaaattcatcattattacttttataattgttgatatttctaagattactctttgaagaattattatttggcaaaatatttatcggagatgtattataatttaataaaatagtggcttcactacctacagcatcgtccatattattagactccttaggtgtaccagccagatcatttctaataactcttgatttattattattattattattattattattattattattattattattattattagagttcagttgtgagagattagaatgagatggtgctaaaataggtaacctattcaattgttcctgacaagttgtaatgtgttttttacccttttgattcgagcctgtattatgacgactatgaactaaaccatcttcactacttaaatttgctaaactagggcgtgtttcttctaattccattaatggcatagatagtgtatccaatggacttgtcctgtcaggatcatctatgatatctcttggtgttacagtattattattattattagtattagtattagcattaacgttagtattagatgtactgttgttactattataatgatttttaccgctgtgatccaccattatattattgaattttaaagtatcattatcaaatataaatgctggtgtcattgtttctttattatctgattgattctttgttacgtcctcaaaccaatttaatgcattctcgtcaaaatttaacgagtataaatctaattgatcagtatgaattggatcaataggttttgtatccattctttctgcgatcggagctatattagcgttattgtcatcatcatgatcaatgatgttatttaaaggtggaacattctctttattagagtcaacagtaacaaatgaatcgtttattaaaattggggtattttgtgattgtgactgtgatctttttttattcttcaacgctgtagtattggtagatttgctcttggcctttggtttcttgatagctttactttttttagtttttgtggatgtttgtttagctgttattccacctacattcaatggactattaccattagaattattattatttaattttttattcataaaatcaaatcttttgctaaccgaatcatcaacgatatttctttggacggtattatcattctgtagtgaattaatttcatatgtgaacatttgtgttcttggataagttgacgatgaatttgaatttgaattatgctcttccattaatctatcagccataaatatcttatgtgcaatagaagtcttaccgttgcgtaagcccaaccctgacgcattcaaattccatattggtaatgattgagtacgtttagcctttggagctggcattggattagtttgtctcttttgtttaacaattttgtttatcttctttggcaaagagggcacagaatattgtggagttgaacttgtttcagatgtcgcagttcgaacagctgttgagacagttggcgatgctatagaaagcggactgattaccatagtgttctgacgtcttgcaattgttgatgctcttggaatatattttggtttcttaggtacaataattttagagaattttaattttatttctaatgtattcatgcaaagatcttttttcgaattctttttagtattactgctattattgttcttattattcacactattatgggaattactgtaggatctacgtaataatgccgaaaagttagaacaaactctacccgtaacaatcaaatcctcatcttcatcttcatcctcataatcctcattttcactgttgtcctcattatcaccattattattgtcgttattattatcatattcttgttcttctaacccctcttgcacgtctatattgttaacacttccagtattagtattactactaatatcatcctcgtctatcactataatatcttcatcatcctcttcttgtatttctgttaagttattgttattattgtcgttattactttttctagaccctttattgccattattattattattgttgttgttgttatgacggcgaagtttatttaatctagattgtatatcagatagtaatcctaagctcactaaaggttcattaacttcacatatgtctttataataaacattataatcaattctgatatcttcaccacgatttatttgagtatgagcgttactattactgctattattgttatcattatcaatttgtaagacctcaggagagctggtatagatttcttttaatacagtagatagattaattaaaccaacatttaaatttatatcacaatcattagtgttaagtccattaaatttttcattaatattacttccattattaatataaatgttattattactagttctatcagcattagaatcatttttgtcgtaattgttattagtagtaatgatagcagtattaaacttgttaattttgttatgattaattatattattattggaatataaatcatttggatttggtatactcacgactcgtacccgctgaggctttttagatctagctagataacttatgctattagatgtattagtcccgtcatctaatgtataaagaatcttcaaagtcatatcgacaaaatctgccatcttgatttgtttctttgtatctattgatctacttatctattcaatgaattgtctctattctctctcctaacttttcaaaaaagctttcttttttaataaatgaatactatatgaatattatttttatgctttaccaccctttttttatcagctttaacctaatatatatatatatatatatatattgagatatatttttacgtgtgtgatgtaagaggtgttggttcgtgttatagaaaaaaaaaagggttagatatttcaaacttatgaacaaaacgaaataaataaaattatacagaaatatatatatatatatacttataatatatatacttataggtacagatgagaaaacaagatattaagagtatgctttatgctttttacagttttctttttaacatacactatgtttttcgttaacgcgacgcgtctttcttatttatttaatggatttactgattcaattattcgaaaaatatttaacgtgtcatcttttcttttttttttattttattttttttttcttcctttccttcttctttctcaccttttctttttgttgtcgctgtcttaggtgaaaagaagaaaaagaaaacaaaaaaacacgtaactatctttttttttttttggttttctaggttcgtgtttttttttttttttttttttttaaaactttaagggtgtgtggaggcccgcttgttgtttgtttatgtttctgtccgtcgctgccattaacgttattgccatggaaacagggaagtatgtaggtttggacggctggtgtgtgggtgtgcgtgagatctccccttctcctcattcccctttctctgtggtaaaacgatacagcagaacaggacagaagataaggcaagaagaacgtaaaggactgatgagaaaacaaaaaacaaaagcaaagaagagaaaaacaatagaggtgaaagttccttctcagtgtcagcggctatttgcagagattatggatattagccgcccaatattcattataactcttttggaattatgagaaaagaaattgtttgattgacttctctgtgttaatcattttgtactacataagcaatctgatttactataaataccaccttgaatcattctttttgtcatctttaaaaataatcacagaaactgagaataaattctgggagctattaattatgtaagtctccagtagaggatagactatttgttgattgaacctatgaaacgtatacacgtatgtgtattgtaaccctattctctggtattgggatttattattcctcaccgttcgttttgattcgcggctcaaaagtctaatctcgttagtttaataaagaattcactatatccacaccctgtttcttcactttttttttcctctaactaaaaggaaatgacaaaagaaatttcatctatttttaatttttttttttttttggtttttttttcttttttcttgatgagcatgaaagatcagaaaaaaaaatttttttttcattcttattgttaaatattctatttgacagataagttcaaataatatattactatgccatactcagtcattttgctatatatcaactaaattcctgatttcttcttcctctctatcctttctttttttttcttctcttgtctctttttattaagtgatttgtaaaattacatatacatagtaaaataagaagaatattgtgttatatatacatatatatatcaaccaaaatgccaccaaagaagtttcaaaatttggatgattttttaaatgaacaaccaaaggatccaaacttagttccatctccatatggaggttattttagggctaataattatcaacaacaacaacaacaaagaactgttaaaaaagattggaatcaaggaagtaagttccaaagatataatcaaggtagtaacaattataacaattataataattataataactatagtaactataataactataataactacaacaattacggtaattatcaacaatatggtggttacaaaccaaattatcaatcatcttatagtggcaactatcaacagtctgcagtcagtccaaatactagtcaagctcctaccccttctgcttccactgcttctttaacttctttaaataacaaactgggcaatttggagctatcgccaatctcttctctattatctaaaatacctgaatcaacaaatattactgaattaaaatcaattattaaagatattcttgacaaattcaaatctgcacaacaagaagaaaatgataatgccaatgataccacaattacagcacaaaaaattgttgattgggaaattttggatgttctaagtagattaattaaaccaaaaaatccacctttaattaaagaaggtgcaatgcttctaattaccaatttagctcaattctttaataataaaaatccacaagaagcctttctcttaccattctttgaattagcattagaactaatggcggataaagataataatgtcaaaagagctgcccaacattctatcgatgctcttttaataactttcccagttgaatgcttgccatcttctgtcttacccgtaatattgaaatatctatcatctggtgctaaatggcaatcgaaattggctgcattaggtatcgttaatagaattagagaagatgcgccaaacgatttactggaattgacttttaaagaaactgtaccagtgttaactgatgtagcaacagatttcaaacctgaattagccaaacaaggttataaaactttattagattatatctcaatcttagataatttagatttatcatctagatatgaattaattgccaaaacattacaagatccaaccaaggtacctgaatctgttaaagctttatctagcgtcacatttgttgccgaagtcactgaacctgctttggctttattagtaccaattttaaacagatctttaaatctatcttcttcctctcaagaacaattaagacaaacagttattgtggtcgaaaatttgactagactagtcaataatcgtgttgaaattgaaagttttatcccgcaattattacctggcattaaaaaagttgttgacactgcatctttaccagaagttcgtgaattggctgggaaagcattaaaagttttagaaggtgatgaggatagtgtaacaaaaacaaatgaaaatgaattctctggtagattaactattgaggaagctaagaaattccttttagaaaaattgaataaagtttcttctaatcaagatacaagctatcctttcaaaccatttttatcaactcctgataaaaatggttgtgatgaaactgtaattgattacctgggtagatggttgactatggaagctaacgttaatgattggaaaaatattgagactttcttaatcaagatcctcggtgaatgtaataaagatattgtcgagaatgacttcgtggatggtttaagattgattttccatcaagaaaaagttaaaaatgatgaggatgaaggtgtagagattgtcaacacagatttttccttagcttacggctcaagaatgttattgaacaagactactttaagattattgaaggggcatagatacggtttatgcggtagaaatggtgctggtaaatccactttaatgagatccattaataatggtcaactggaaggcttcccagataaaaatactttgagaacttgttttgtcgaacataaactgcaaggtgaagaaggtagtttggatttagtttccttcattgctcttgatgaagaattacaaaacatttctcgtgatgaaattgcaacagctttggaatcagtgggtttcaacgaagagagaagagctcaaactgttggttcattatctggtggttggaaaatgaaattagaattggctagagctatgctgcaaaaagctgatattttattactggatgaacctactaaccatttggatgttactaatgttaagtggctacaagattatttattggaacatactaatataacttccttaattgtttcccatgacacaggtttcttggatgctgtctgtactgatattattcattacgaaaataagaaattggtttattataaaggtaatttggaagcatttgttaaagttaaaccagaagctaaagcctactatacattaactgacagtaatgctcaaatgcattttcctccacccggtattttgactggtgttaagtcaagatcaagagccgtggccaagatgtccgatgtcacctttacatatgcaggtgctgataaaccttctttaagtcatgtttcttgtgcattgtctttgtcatctcgtgttgccattttaggtcctaatggtgctggcaaatctactctaattaagttattaactggtgaattggtccctcaagaaggtaaagttgagaaacacccaaatcttcgtattggttatatagcacaacacgccttacaacatgttaacgagcataaagaaaagacagctaaccagtatttacaatggcgttatcaatttggtgaagatcgtgaagtcttattaaaggagtctagaaagatttctgaagaggaagaggaaatgatgcaaaaggaaattgatatagatgatggtagaggtaaaagagctattgaagctattgtaggtagacagaaattaaagaagtctttccaatatgaaattaaatggaagtattggaaaccaaaatataattcttgggttccaagagaagttttaattgaacatggatttgagaaattggtccaaaagttcgatgaccatgaagcttctagggaaggtttgggttatcgtgaactgattccatctgttatttccaaacattttgaagatgtcggtttggatgctgagattgcggatcacactccattaggttcattatctggtggtcaattggttaaagttgttattgctggtgccatgtggaataatccacatttattagttcttgatgaacctactaactatttagatagagattcacttggtgctttggctatggctattcgtgaatggaccggtggtgttgttatgatatcacacaacagtgaatttgttggtgccttgtgtcctgaacaatggattgttgaaaacggtcaaatggttcaaaagggtattgcacaaattgaccaatctagatttgaagatgggggtaatgttaatgcagttggtgttaagatgatttctccatctgtcgacaatgatgattcacctgcaaatattaaagtcaagcaaagaaagaaaagaatgacaaggaatgaaaagaaagctcaggccgaacgtcgtcgtttacgttatcttgaatggttatcctctccaaagggtactccaagaccagccgataccgacgatgaagaagaagattaatattacataattaaattgtatcataattaaagatgacattatacatacgtatataaatatatgttatattttgtttaaatgtatatgcttgatagaacaaactttttttgcagtacgtcaatactttaataatttgataattagctatgcacatatattaaaaataatgatagaaattagtatagttttaagaaatattttgaatagataatgtgtactaagtaaattaataaataagtaaatgtgattaaagcaattataataataacagtaaatatacatatatatatatgcttttatgtgtgtatgcttgtgtgtatatatgcagtatttatcttacatgtatattctaatttaaaattctattattggaataactatcttccaactcacttgagatcttttcaccttctaactcaataatagcacgatccacgatagaacgaagaaaattatcatgcttcttttccccaaggatacttatagtgttgaagcccataccataatgaggatatgaaccaattttaatctctggagatattttttctgactgttcctggtataatttcaaacgatgagaaatttgtgattcagttaattttgtcttaacaaaatatctaacatattcattacgatcagtagttaaatgaaacaaatctttcaagattggtgtaaaaaaagttaacattttttcaaatagttgtggaatacctgggaatataaacacttgttgattaatggaacaaattggtacccatagatcatctgaaacataatagtttttgacgttactaccagaaggtaatgtagccattttataataatcttttaacgcttgtttatctaacctactctcaggattttgtttttcttgcattctttttttcaattcttcattaagtacacaaggcaagccaaaacttttagatattgctgcatacgttatatcatcgtgtgtacttcctattccccctgtggttatgataaaatgatattttttggataatttacttacagtttcgacaatttgatcttcatcatctccgattgtgattatttctttcaacttaatcccgagattaaaacagtacttggcgaaaaaacgagaattagtatcaatgatcttcccatttaacacttcatcaccaataataatacatgcagcactgattttactcattcttaaactttgcacaacactaatcatgtagtcgcagaatcacacttaaatcagcaaaaggttcagacagtttcaagtataactttacctcataaaacagagtttctgaaatataacctattctaaataatgacttaggtccttatccttttagattcgagggctatggtggaactgagttacaattttttctttttctaagcccagcaactatataattagtctcatttctctggctaattcctactattcagttatctttggtttaaaaatttttaatatatcacattatatgcaatcatttccctcttttgttgtttctttcctcctgtttacaaagtcttggagcattggttcttttcttatttcggtgatattgccttatctggcaatgaattgcaattgtaggaaattcttcaagaaaaaggaaaaaattgaggtgaaaagaaaaaaaaaaaaagaagaaaagtaaaaattcgatcacgtgactaattagattcctttttttttttgttacagaaaaatcgatatgcattttttgtcattgttattgtgttatagggaccatcagaaaaatttggatattaaaatgggagaacataattcatcagcttcaattgtagcgaaataaaagaatgtcttaaaaaaattagtactctctaatatttaaccctccatgtattagggcgtgtcttcatttctgtgtttctcttcctgtttttttttttgctttcattcccacaagaacctatttaactatcatcgaagaatttttgcaaacaaaaatatagttcctatcataaatatacaatgtccctaaacacatttgacgccaacaacgctgataacctagaagagattgaaaaacaatttgctgtcattgctgtcgaacaagctgaaacttattggaatttgcttactaaagttaagggttctaaattgcgtctaaccaagcacgatgatgagatttataacactttcatgcaacattttccagaatacaaagatattgaaagactaaggaaattttccgaagaagaattgaaatctaagactggtaaagaaagatggagaaaatacattgctctttttgaaaagactattgaagattacaactttggtactttattaagaactgatgctagtgatgaatatggtcaacataccacaatctttgcagttagaattcaattttatgcttttgaaattgccagaaataggcatggcttaaatgattggatttgtagtaattaatttatatacctttcctttgatatattgtcacttttatttgaaaaagatatatgcatataatcaatattatatacaaattggaataattttaaatttatgaatagtatcaaatgatacatgcatgtagtaagaacggataacacagaagaaaagtaaagtagaaacctatagataaaaataagagtctttcatagactagttcattatgtgtggttcaatattatctccgaatatttaaaatctatatatgtttctgtacatatttaattataaagaagttttaataatacttactgtgtttactccgacaagccatttatcccaataatgagttatatcattttctatttagtactattatattaggacatactcaattgttaatttcttgaagtttgttatattactttttaaaatataatgtaccttttttgtggatttagtcaatatatatatatgtatcatcaaatactttacagactcacattaaactaaattgtactgagaaaaactattttaatttatgtaacaatatttgaattaaaggataagaatttcaaattattaaaatagtatcaccaagaaatctgaaagaagtttttagtctatataaaatttgttgtattgtgaatatttctgaaacgcttttatgtatgttgagctttaaatattgtctttttcaattgatactaaaaaagatatatgtacctataaaataatcacctattgaataatggcagaatgcaactatcctaagaatgcactattattagaaagaaaatatatatatatatatatatatatatataatgatagtcggatttcagtacaaagagtagtttctgaagaatgtaaaactgagatgccaaaggactttttattcattcctttttatttttcaataagaaaaaaacaaggcacacactgcagaatccatttggaacgtattattaagaacataaaaaatttctatcataaaaataacaaaacttgataatttttatattaccttatgctaatctggagtttatttgtttagtttattaatgtgaacagaaagagcataatatcatagtaatatttttacatagctagactgtgataatagttttcttagttttcgtgtaagattcatactgtgttttatcaatcgaatggcaatatctctttaatggacctaccagatcaataaattctatttttgatttttctgcttttttcaagtaatactttattaatgatataggaacatcttgattgatattgccatctttaaacagagcttcatacatagaatttctgaaaataagggcaattttataaagttcaaaatactgttgtagaatttttttatcaggaatcacatccaaatatagaatatcaagaatgtttcttttcaaatcaccaaagttaacggcgtctggtttatgaattactgtattaccattgatatcacagattggacatacaaatatagtattttcatcattactaaagtcccaatctttgccaccaatacagattgtgtgataccattctttacaaatatcacattgaatcatagtcttccctccttctttttctctacaaagacaatatagtgcctcaggaaatgaactttctgtctcactttcgatatacttgtctcgtgtcaaatccaatgttttcttagctgattttaatatacttccaatactttgaccgttggtgattcttcttagttcactataccatgccttataatctgcaattccatctgccagggatggtttcccttgcgcctcttttatattgattcttgtatcttctacagagccattaaatcttgggaaatattcaaaactttttatagaattacctctaatgtaactatctatttcatcaataaactgcttattacctgctaattgtgacaaaaaagggttctctttcgaaatagtgtcttgaatacaaccacttatcattgttaaagtccttttcaagttaatgggaatcggtaatctttttttatctatttgaactacgatactatcgatatcctcaattgaaatcattttgtgttttctactcttatcaatgatcatctgaattttaccaaaaatttcctgacataataatattctttctttgacctttattaatttaggtacatcttcttcctgacaaaaatttataccgtaattccaaaaatcatataaaaaagtcaatgatcttgcaattaatgaatcagaaatatcaaaagatgtgaataattcataatagatatcagaccatttaaatctacagattgatcttattaatatttgacagtacgtatgatctaatggaatttcaaaactttgtaggtaggccttttctagcagttttaatttatttgaagcaattgctatttcgactttacttttaaattcttgacaaattttgtataattgtatcatataatccatttcaggtgatgtaatagatgattgcattaaagtctcaaccaattgattaaatttagatactatcatagttaatggagattcatttaaaactgttaaaggattcttttcaaagtcttctagattaggtttgattaattccagattagaattgaattgaaataatatctctttacattggttaattgaaagatatgctttgtcaatcaagtctttaatactataataataattatcatacactgttgtctcctctaataaattttcaatgacatttaaaggaattctttcattatcgtatttttcaaccaacatcatagatattttttcttccaatgtcattgataatagaggatcgttggtattacttgaaataagcaaattatctgtactatctattagtgaaagcagcagatcattttgataatataaatgaactgatacatgcatatttgataacggcacatcaaataaaatccaatcactgttatctaaaagttctagattatttagaaattcagctagagataaagtcattctagtgcttttatattttatttcaatttttgagaatccagttggttttaatgtaaaatcagatataaaatcaaaacggttttcgattacctgcagatcaggaaaatatttaaatacttgagatctttcatttaattctaccttcacaatatcagataaatcatgttttgctttttcaaccaagcaatgatcattagatgattggataatattagtcaaaagagaagtataatcgatgcctggtaaacagttatttaacgcaagccaatgggatccttcctttaaatatctaaatgatatagatttaggcagaaagtaagctgactcagaaaaataaaaatcactacctaacgtggaagaataacattttggatatttaaaaatataagaaccagattcttgaaaaattctataaactttaataccgttttcccgtagatgtgatggtctaatttgtaattgctgatctatcaatatgatattttccatttttttactattactactatctgcaaaattaaaatcttcatatgttgataatctatcaatgagagtataagaaggattttctatttcatcatttttaaggcatttataaatgttagagttcacaaattttgaatcattgaggattttactattcaaatttaactttccataatttattgaattatgactgctctggagatatttttcaaatttttccatatcctcgggtggaatcacataccatattttgggtgctccaatgtgttgataatctacagagggtaagtatgtatcatttattgaccatcctgataccgaacataacattccaagatcatatttagatgaggtataatcacctttatcgaaattcaaatacctaaaacatgattgactgtctaatggaacattcgccaaattccacctgtcatatttcttttgcaaattatcggatgaactttgaggttcttgtaaatttatcttgtgatttgcagaacttaatcttgaaccagtaaaaattgttaaatctatattatctgactctaagatctcaaaatagaactcttcaaattgagttatatctaccgattgtatattatgagtatcctcaaggaaaatgtcataatattttataaaaatttcttgaaaaatttcttgacttaaattaaaatattcttcaacgttgaaagttcttgctgctagattaacatatttatcatgatcatatagtggaaaccatgattgccattgagaaacaaatgtgtctctttcttgtatttgggaattcgtaatgtctgttttcgtccgaccattgatgtttaaatgttttactattttcatgtctttaattcttggataatcatcgccaatagaacataattcatatactgatttaatggtgtcctcgattttgttcttatttacaagcctggtatgtttgtctttgtaagcatgagttatagcaaagtgtgattgttcaaaatctagcaagaatttttgatagaattctctaatttccactttttcttcttcgttatgtgtataatttaatctcttctcgatgaatccccattttttacctttctcaactttttcaaacccaccatttctttgaaccaatctatataatgaataaaggctgacggatttactgttaattttaggtagtttatcaaactcagaatccttactggagttggtggtatagaattggtaaagatcatgataaaagctcaatattgatctattaataagttttcttgatgttaatttctgttgtctacatttaaatgaaaaattctcaaaatttatcttctctttataactatcaggaacctttgatgaattgaacttattattattatcattgataacttttagtttaatacaaccatatttttggcctatatcactcactttattaaaaaaatcaattggacttttaaatacttctttggagacatgaaaagttggtatagaatccttggagattgtatagtattgaccagaaaggttatggaatagtctttcactagtttgttcggatgatagatcagtaattgaaagagtatttatttcaaaagttttcgcacctagtttgacactgtcactttcatttttctttaaatttttaagtaaatctgatatggcatattgattattgttaatacgatcagtagtatgacattttgccgttttaaataacgatcttttttcattcatggaagttagtgatgatacggaagaatttgaagatgtaatattaggtgaatcagaaagccttcttttcctttgcataatattattattaattgatgatgtggtagcatgacttgtatcattttgagattcagcaatacccaattgttcattttgcaaatcaatggccctttgtaacgttgatgggatagagattacactattttgttgggatagaatagatctgttaatatttgcgtcattagtcgtagttgtgttgtgattattattattgtccttataattattatcgttgtttgtgtttgcgtcattgccgactgcatgtatagtttgtgttggattattcccaattacaatatcattatcatcattagcaaatgcgttattgtattcattttgagacaagccatctaacaggtacagtagtttatcagatgtctctttatcttccataatggctcttttatctatattctttacaaatatatatttatatccatatatcctatttcttttttttattttttttgtttaggactattgacgtacaacaaaatcttcaaagacttttataaaaacaatctacaggattgtaaacggtgtatcaattataaaatttccaacaatgttaaagaaggttttcacatgttaccattttatttttgtctaagttttccctcatgggtttttttttttttcagttaatttttccttttcttttttatttttgttcttttaaaatttatgagatgaacgtctgtcagttcaattacaagcaaagaaatacttctattctcgagaggtttcaatattaggtaggatatatatagtgagatgtatatataaagcttaaatatccacatggggttaaaaaagacgatgttttgaagacttatttactttaagaaagaaattaaaccaaaaaacaagataataataataataataataataataataataataataataataataataataataataaggagagaagaatcttgatgtaatgagaaaaatattattaaatgaacttatttaaagaaaataaatatatatatatatattttctttttgctatgtacactgttaaatgttcatatgtgtgtgtatgtgtgtatgtgtgtacttacttgtgtggttatctgcgggaattcaaaggattttcttttaattgtgtgttgttttgtctagtttttagtatttttattggagtaacaataataatatatatatatatatatatatatatattattattgtcataacagcatgttaagaagaaaaaggaaaggatatataaaaaaataaaaaaatagaaacctaaaaaggaagtgttttgaaggttcttttcttgcattacaagtctctttcagttggattataacctgctgttttcatattttctgctgttttccagtcatttttgaaccctctaccagcacaggcggactcatcttggtcattcatgtgttgatgatgttgatgatgttgtccatgatgtttcatgccaccagaacccatgtatgtatcgttcattccacctgatgtacgtcctagatcgtactgatcacgacccatatcttcttctctttctaaattttctccagtttggaacctccttggctgagtcattctatgtccaccttgcataccagcatgtgattgcatttgtgcacctgcttgagcttgtgtcctttgacgttgtttctcttgattatcgtcatctaatgaccctccgactttttcagtaaatttatgaattaaattagacatctctgtattgaaatcgaaatttggatagtgaattgtatttaggttatgaaagggcagtgttattttcttctatttctactggagtgttttgttacttagttaagtgaccttattatttattgatattaacaagattgatataaaagagactttatagaaccaaaacagaattagttagtaagataaatatcttgtagatatatatatatatgtatgtatgtatgtatgtatgtattaatatgtcagacatatttgaagggaaacaataagagtaatgtatcgttgtatagttctcttgttgttatcttacatcataattgaacatttttgaaaacaacaaaggattcttccagccaaattatgcacaatacaacactgcacaatattgtattaagtttgtttctcccttcccttccccttccccctttatgctttcttcgtatcaaacacttcctttaaaccatccggtatcttcaatcacaatgcgaaacatctattgcaaactgaacaggaatgttacaacgtcatcatcagcaacccttaaatataggtaccttcgcactaccatgcctctctctttctttccaccaatcactaatcaccaataaaccaatcgttcacaacggaacagatagactatcacaactatcaccaacaacactatctccattaactgttaccacagtagggagtactacattgggtattatactaaaattcactcccagtaatattactgctggtatgtattactacagctattattatgactattactgctattgtgattaccaacaactaccatcgctgcggtccatgttttcgtaatgaattggaggcaattgaagggagagtttccgtgtgaattacatacgcgcgatcagtatacgtcattaagggaaacagtagatataagtgacgtagacaaaattacactatgtaataatcatcgtggtttgttgatatacagaactattttcttcgttactaaactgctgctttataagatatagcatatctattgcaattatttatttctttgtcatccttgacacacgtacattaacatatatacacatactcattcatatatatatacatgtatatataacctaaaaaatacataccataactttcgggaagttacgtttatgtattctgtcaagtagtaaatagacagatatagtatatatatagatatatacaaatatcgatttcaatattattgattatggagggtacaggtgataagcatatagttagtgaagttttaagagagcagaaggaaagacttgcaggtgaagctaaggtcattagtgaaaatctgtccaaattgaaagcagacaaaagtttgaccgatgaagaacgaaaggctcaaattgattataataccgagcaatataataaattaattggtgcaggttcaaaatggaaagaaaagtcgaaagaagaagaacagagattgtaaaccattaaaaaactgttgcaatcataataagaaaaaaataaaaaaaaaagtaattatgttttcttaaagtacttattttttttattgattttaaacatacatacatgtatatatatacatatatatatatattggtctaaatagtaaataaacaattatatatatcactataatttttatgattattatcacatatatctaataatcgttgtcatcatcgtagttgttgttataggaatcgtttccataagaattgttattactgtaagaattgtcattgtaatgtgaattactttgtctgtaagagttattgttactgtaggaattgttgttcccataaatattgttgttatacttgtccttgttcttcttagaagaactataggaatcgttgttgtcataattgttatcatttccgtaggaatcattggtgttatagttgtcgttgttactagaggagttgttattataagagtcatcatttccgtaggaatcactattatatttgtctttgttcttcttaaaagagccataggagtcgtttttgtcataactgttgttgtttccgtaggagtcattattactatagttgttgttattattgcaggagttcttataagagtcattatttccataagaatcatcgttatattcatccctgttcttcttagaaaagccataggaatcgttgttgtcataattgttgttgttactgtaggagttgttattataagagttattatttccgtaggaatcactattatatttgtctttgttctttttagaagagtcataagaatcattattgtcataattgttgttgttaccacaggaatagtcattttcgtatgaatcactattgtacttgtttgtgttcttcttagtggagccataggaattgttgttgttgttgtaagaatcattattgtaagagtcattgtttccataggagtcgtcgttatacttatccttgctcttcttagaagaaccataagaatcgttggttccatatgaatcataattatacttgtcctcgttcttcttggaagagtcatagtagtcgttattgtcataactgttgttgttttcataggagttattatcatcatagtcgttgttgttactataagagttattattttcgtatgaatcactagtatatttgtccttgttcttcttagaagagccataagagttgtcattgaaagagtcattacctccataggaatcactagtatatttatccttgttcttcttagaagagctataggaatcgttgttgtcataactgttgttggttccataggaatcattattatcataactgctgttgttattataggagtcattattgtaaaggtcgctattttcatacgaattgttgttatacttatccttgttcttcttagaagagttataggaagcatcattatcatagtagttattgttgttgttattgtttccattatagtcgttgtttccataggagttattgtaactatcagaattattgttattatcataataattatcgttattcacataagaatcatcactaccatagttgttgttgtcactgtaggaattgctaccgtaagaatccttgttattgtaagaattattattgttatcataagagttgccattgtctccataggagttattattatcgtaggaattgttactgtacttgtcttggttctttttggaagaatcatcgttagatgaataataagagctattgttgttgtacgaattgttattctcataagagctgctatcataagaattgttgttataggaaccattgttgttgttattgttggtgtcattgatatgagtgttggataattgttgtctcacagaagattccagcttgttaaaattatcttcaccaactctttgcttaaaagaattgattttatcttgaccaataaagttttcaacttgatcgaccagatcagtgttattagaatcgatatcacggtcggtggtaaactgcttgaccttatctaagaaacccattttgtcaattttactaaagtaagatggttatatggtgtgagttaatggttgtagcctgttttgtgagtgttgactttcttacatattcataaatagaaaggataaagcggattaaggaaccaaaaattttccagatatgccaagtgtttcgataaattggaaaaaactttagtagtatagtttttttaacagcttatgataagatatttatatagttgacaagatcttcttattttagaaataaaacaagataaagagagatttaaacaagaacaaaagaacaggaaagaaaacaatagaagtaaagaggtcaataatagccgcaaaaacaaaccattcctgagaaagatatacgaaattcgaaaaaccaccaatttttttccgaaatcgctaaaaataaacgtcataaattaaaatagactaagccgaaaaagaacaaaacaaacaaacgaacaagcagtttcttttttttgtgttcatattttgtcaaaagaagctaacatggcaaagattgttacgagaaaagattggataaggccatcgtactctttatcttttagttatattatggtttgcatttatatttgaacggtggtactgttgtccaaattttatcgtgacatcgttatggattcttttctctatcaaaatcctgtatatatattttacaaaatacaaaaggatatctttttttttttttacaaaagtacccgtttcttacgtatatgtatatcaaactatgattttataatgtatataatattaaataccggttagagattgctgcaaccaaccaatggtgcgtctcttaacctctccattttcatctctatataatcgtcgttcttctaatatttttatcatctcatcagctgtctttccgttatcaatcccattcaaaatatatttatataaacgcttgcgacgagagaaagtttttcggttttttgttagcctccatttattgccatacttttcctctaaacctcgaattgatggattcccattaattccatgaacatattcctcccaaatagttcttactgtgttaggtgcctttaggatcttataatttagatcattattgacttcgggtgttgagatttcttcaacagttttctctgttttttcattatttttcgttttaacttttttcaaggatttgtttctagattttttcactcctttagttgtaatctttttcctatcatcatttatatacatttgagccacattattttcttcgtctactatgtcctcattatcctcttcctcgtcttcaattgactcattgcaactttcatttatttgtttgatgcaatgttcttcttcctcttcatcatattcctcttcttcatcatcgtctacatggataacagattcggcgtctttcgagccattaatactgtgatgatcatcattatactcttcttctttctcttcttcatcatcatcttcttgatatccatcttcgtcctctaaaacttcaacattagaaactttatttcccgaattggtgcttggatttgtgtgttttaaattgtatttcgtttctgtattagtatgactagcgttatcatcattcatattattagaaggtgatatttttgttgattcttgattaatatattcattatttgggatcatagcaacttgattgttgtttctgattgttgtagcattattattcgatgaactaattggatgtgttgttgaaattggggtggtatttaccggttcagaagatggaaatatgaaatgattaatattaagtggatccaatgtattaagatgcctgccattagagttagcatttgtgatcgcggtagcaggtactacttttgtattagtggaagcattcagtttggggatatcatttaatgatgctgttaatacattcgaattgttgataattctatcattggttgacagaggttcattcctactgtcactattaaaaggtaggatactacttgttactaatgatgattgttgtgttcgattatttgtgtgaaatcttttccgttttttgattccatttgggtttaaaacaaaattgttgtttccacgaatatgtttcttaaaaggaacaaaataggaagattgtagagtgtgtaattcagggactgagtttgacatattcaagcttgctatagaacttttaccattattattatttacaaacttactatgggttgtgtttatattttgattattggaatttatacttgtggataggttattaatgtgtgcagtaaccagatcatcactattattcttaatattattgttataatgattaccagtaccattgtcaagtactctggtttgattattctgtgatagatacgatgaagaaacacttgtaattgattttaataaatcaacaatgaattgtctttctttagatatttccaaataatcattttttctatattcttgtcttttttgttcagttattctactttgttccagttcacatgaaaaattgttaattacagtttctaacttttgtaaagtcttattttgtatattaaatgcttttgtcaatttaaggaattgttcttccatggtaatcattctagcagccatctcatccattctttgaaacatgcgtaaatgattggatgaggattccatactggaagtaaatgacgctggtgaaggattgctatgcggttgtgaaggctttctaattttttcttgaatatttatatgtgaagaaggtgtggataatcttaatttatttatttcattgtcggtcggttttttgtttagttcaactattggattgatcgaattggattcagttttatctcctgtacttatttgacaaatatttggcgaattaatgttgtttattgacatagctgtatcagaagttgtaacagtcgaatttccatgaaaattgttgtttgtttgattgtgtgatatattcatatgagtttgcggaaagtcgattatcgtattatttgatttactagagatttcgttgagattcattgctagtgatgaactattagatgattttggtaagtttatgctttgtgaattattcatagtagcagtttcaacagtatttgagattggattattattaatggtatcagaaacaataataatattattgtcaatgctgctattgttttgaccaatttgatgattattctttaaattcatcatgtttgaattattactattatcagagctgttgaattgttcgtcatttatcaaattttgtgggtttacacttgaagatgatatcacattaacgttacttgttgtattttcatttgattgtatagaactaacagtcaactggaacttgctattagtattattattgttattaacaatatttaccattttagaattattagaattaaattcgttagaggaatccttaataatactgggcggattggtttcggacataataaaatgtacattgagatatgaaaatgaatctgaaaactttaagttctaattagtattacaagtagtaacaaatacagaaggcatgtatgtaagctaataaatacagagaggtaagatattagaagtttcttatcagattattaaataatggctagggtaatggacatgaatagtaactaattatgatgaagtcacttggttccaatattatttattatatttaatttgttagaacaatttgatgatgtgatgaaattattagtaaaatactctggataaactatacagcgtttttctaaatattattatttggttaaataaacaagcaatatgggtagtatattgtcaatacatggatgctatcaagtctgttctactaagtttcctatctataaaataaatgatatgtgatgcggcatgtgtgaaaaaaaaatccgaattattccgagatagttttacaaaattaccttattgaaaaaataaaaaatattcttgtaattcgaatccgctaaaggcttaagttttttagagatagtggcttctttggaaagatattggcggattttacattcagtaatgaaagacagaagatcttgctttctgaatcactcagtttgcagggaaattgtttcttgtgtctccttttattgatactggttcatgtaatagcattatttctcttaatagtctctcatcttgtaccattttagatgttgatgtgttaggattttgaatactagcttagagaaataagggttatcgatattttttccaatctctccttttcagaaagttatataataaaccatgacggttaacatataaaatattataaagatgcaaaatatataattagtagtaatcaacaaaaagtaccaagaagttagcagagaataaacaagaataaataaaaataggaaattatgtatatattatatgttacttagttctattagtgtattaatgttttaatattacgtctaatgatacagacagagtctatgtcttgtattcgatcaagtcaattattattaacaccactattactgaaatgactgttattagaagttgtaatagataaaaacctattgcgagaaaaatactttcctagaacattaaaacggataaatgattcttggttgaatgcccatatatgttatataaactatagttcactcaaggagtaactaatgtacacagacatatagataaacatacttatataaacaagagaaacaagaatgtcgactcaacaaaaagtttacatgatggtttatagtgacatcatgattttatatgttacaaaaatacaaaaataagatggacgagtccggaatcgaaccgaagacctctcccatgctaagggagcgcgctaccaactacgccacacgcccaagagaagctatgcggttgttctagaatagaatagttataaccatcaagattacataagatcctgaatgaatttagaactatttattgtcttaataagccatacacgtgctacaacattagatgctgcataataaagagattggattacataagatttaacaaatctagaatttacctattgttttaataagtcccacgtgtattactgatcaccatgattagagaattggggtgcagttctaatccactagtgcacctaaattaatataataaattttagggtttgaatcagtcaagtcattaatgtactaatctgaataatcgatcgagctccagaaaacatataaaaggacaacgttttctggagataaaagatcatcttccataaccgtttcttgtaaataatttatatattatatatgaacaaaaagagaacaacaagcaagtaacaagttaagtaactttgaataaatatattagctcaatataagccgctcaatatataagaccgttttagtaattatattatcgcctataattgattactgtctcgattacttgaatgactattaatattatttgcgcttccctggaatacacaaagaacttcaccacctcataatacaacagcagttgtatactgctccataatagaaaaccatcactaccaagattatacaagattctgaatgaatttagaattacctattgttttaattggtcatacatgtattactaatgaccatgataattgtgccgtttatcagtagtgcatccaagtaccataaccagtaaattggggtgcagttactaattcactagtgcacctgaattattataagaaatattagagtttggatcactaagttcattaaggtatcaatctgaataattgattgagcttcagaaaacatataaaaggacaacgttttctgaagatgaaaattatcttccgttactcctctcttatacataattaatatattatatatagaagaaagcaagaacgataactataagaaaatatataagtttgatatagtcgtttgatatataaggactgtattagtaattaccttactaattgtaacaattactgtcttgatcaataaattatccgttagacataatctgtacttcccaatttattaagacaattttgacgtaaggctttggaatcaaaaattctagtagaattcattttaaactaatataataagataatgtaacttacaataggatattggtggtattataagttttattgttatttatagtaggaaattagtggtactataaattgttattgtattgcttggtctttttctttccacatatgtaatatacaagatacgatattatacagtatactcattttatcttcgaatcttctttaatataaattttcataacttttaatcacttagtacgatggatttagattatcaaacataactctaatcatatttcaacagaaaactttaaagtactttgtactacaacacagattgtagcatactaaagaagtcatcactattgaaattacataagattctagggaaatctagaattgctttttgttattaacaaattacacacttgctattactcatcgtaatatttgtgatgtttatcactaatgcacccaaagttactacaattaataaattggagtgtggattaataattcgctgatagattaaattattgactttaataatttagtcaaaccttatgaaacattcaggatactaggttacggtggcgttttattatacaacatagagctctgtatattaggatgtatgataccacagagagtaccggtcaataaacatattaaaaataatatttttaaaaatataacctattttttatgttagtttttgtttacaatttatatatcacatataaaagtgagttagaagtgctagaattaataaaatagtttatatcaagtagaatatattataagaatatattataagaatatattataagaatatatatttgataaaaaaaaaggcaaatctcattaatttaatgctttagagcattaatattgataccacgagttctaaatttcattaatatataggtgtgtgtatgaaatttttaaccctgttatacatatttgaacgatgttttaatatttgtgtaattatcgtctatcctaattgtaaatagctagtcatttgagcaaaacgtaaaaaacatttttctcaaaattaaaaaattacttttattaaagatcaaatttagaaatcgactcttttaataccataagagattttctcagacaatacactactatataaattttaattatatataaacatttacaaatttaatatttgttaattccaagtaatacattaatcatataatttttgttatgttctctcaatgatcaaaggttatttaaaacaagtttggcaatattaatctaacaatcgtttggatacacccacaaactaggcccagaatttcagccttttcaaatcttttacttcaacattgaatattactaacaatctacattttctaagatttttcatttagaattcttacaaatacacttgttattgcatagctaactaaaccttaaatcagtggtctatctttttgtaataatttatgtctgatcttaaaaaaacttttgttataaataaaaaggtaactttgttatgatatacactgtaaataaacctttttatacaaaataacactaaacaaatattttagtaggggataaatctttgaatacagttttgtaaaatcttgaaactatgctattaaaaactactgcaaaagtgttatgaaagatattagataatatagtcaaaattagagaactacctctgtttatccttctatggaataaatactttatatgattatacaaggagcacatagtatataatagtttcttaattcaaattagaaccacatggatataatttacatatcgaaatattttttgtttttaataaatactataaaaagtagtggaacttgaatttcttactattcatggtaatagtgaatatcaataaattataaatgcttattttattttatactaaaaacgtctattatatgttttatttagtgtaaaattttatatcggctttgacactattaaattttctactccttaagatctttgaacaatttttttggtaaaaaaataaaatgtgctcccacacattctggtacatccatatactacatagtaaacaaaaaaactaaattaaaaataattttgttgaaagataatatagatggaactctcgttttccaataaatttgagtattgttttattatccataattatataattatacagactgtcttactaacagtaaattacacattatgcatcctctggatgaataatattagtatacatgttcttagcgtcggtgatcatactatatgttattattgtgaattattattattattataatatgtaatgcaattttccctcgatcttttgattcggaattaataattatataaatacaaaagaaacatatgataaagtatatataacttattcatccagattggaaaattaataagtaaagtcgtctacttatatatatttaccttttggcaatttttcataatatattaatttattttgattctgtttgattttatctccataatattgaatgtgcaaaacaaacattttttctctttgatatatttacatgttactcaaaccggtaatatatcatcccagcaatgcaaaattttcttcagagaaataatttatttcccaactctatataaacttattttcataattttctacatattaatcctttcaagataaccaatgtaaaaaagccttatttttgtattctcttattacttatttttttcgtctatgaaagagtgccttttacttatctatttttactacttcttatttctaaaaataatttacttatattttggattttaaaaacaatatgcctattttaaatttttctaaataatgaatgatagcatatgtcgattcacaatatatgaaaactgagaacaaagaataaatcattcatatctcaaattcaattggataaaataagtaaagaaattagccataatttatccttaagaattttaatgaataatagtgatattaagcttcttcaattctttttatttatgtttcatatgtattattataattattaatatttttatctcatctttttgccttttctttatccttgctttatatttctatttctcttggtaaaaaaaaacaatttaatgaaaacaataagtttgttgctatcaatgaatagttctcttatcaatattaaattaacaaccatcatgatatatcacattgaacaaactaacaaatacaaggttaaatgaaatttttgtaaatataaaataagatttttattgacaaatttaaaaataaatggtaaataagtaactaaaaaaaaacaagtgaacttgtacacctaataacatagtttttattttacatttctgttttttacattttctttctgttttaatgtttatcctcccttctaaccccttctaacattaagatcagactgccaaaacagtttcaaaatttaaatcattcattagtgccataactacattgatccattcgatattttatttccctctacttttcttttaatttaacctatgataaaaccctacagaaaatattatacccaagaaagcaaaaacaaaaaaaaaaaacgtagacaaataatactaatatttaaaatatctgatacaatcttgaaaataagaaaaaatacaaaactaaaacacttaagagccatgaataaaaaactactatcttaagctttaaaaattaacctataaaactgtagacaaattatgttataaaaatttgtcgcaaatctttcacaaagtgaaggagacacaaaaccttatggttttcctattacagtaatattcttaaagtaaaaagtccatctattttcaacaggccgttaaaaaaaatgaacccctgaaaaaaagttttaaaaattttattataagccctattataaattaacatatgtccatatcttaattgtctgaaccctaataagaccactttgaacgaaataataaccgtgatctatagacaattacataaacattatcaaatattacaaagataaacaagagtaatatcggcaccaactattctattgtgaccaggttacaaacccttactattattttactaaagatataaaaaatacaatgactacactcagttattttttgttttaatactttattcttttcacctacttgttaaatgcccactatcaactagatctcaaggtaaagacacaaaattattgtttgaattatcttgataccatttacttagcctagaccctacatgaaatccaggtaaatagatgatttcaagacaccctgtacaaatcccagttccaagcaactatgatcattgaaaaaaaaacagaatacagcttttaacctaaacaattttatgtcagctttatacatgcgcccttttgtgaaaattaaatttgaagccctagattttttcagacggtcctccacttttccaatcttctttcttaaagattggacaattggaaaatcccaacataaaaatagatctaatgctttcctgcaaattcgacaattataaaaaaaagccaagaaaaaaaatttgtcttttagtaatattaatattttatagatcgcttttttcaaacaaaaaaaaatctatttctttcaaaatgaaaaacatacattttgtcaatccatatcgtaccgacattttcataagatatgtcacaattaatcttgcatactacataataaaacaagtgcttttattatcttctcaattatttttctgcattgacactttttattgatcaaatagtaacaatctttaaaatttctattgcaaggaggcaaatcctcaaaaaaaagataatttcaacaacctatattatgccatgaactacaaactctatgcgtgattctttaaatatagaaaagtatcgtctccaagcaattattttgtgagcatgatcctgcaccctttttgacatgtttcatcaaaactaacctttctttaaaatacaagaacagatagcaagaaaaacaaaaacagttcactgaataaactataatatattcatatattacttctaaaattaaaatatttttttatttaacgattaagatatcttcactttttttttttgatataatcatatcttttcaattttagtagtaaaatgtgttactgcattataaacaaatttttgccataatataaggtttgctggtatatttggaacttgctatagcggcttttgcaacaaccgcatgtacagttccaaagaatggtactgttggggctgccgttagtttttatgactttattctgcttggtggcacacatcatccaagatatgaaggtaaaattggtggtgttttggatctagcgtgggatacaggcgaatcactagatgatcatccttattgattcaaaggtgttcctctctctccttttctaatggaaattactggttattataaagctctacttacgggtatttataccataaccactaaactaaatgatagtgctacaattctcgtaggcgctggtgttgcatttgattgtggtaatcaacataaaaatttcatagctaagaaatttagtcttacaggttctggtgtaaataaaattccaggcccgttctatatgagaaaggattactattatccttttaggattgagtacgctaatttctaagtaagaggaatgctaaatgtttcaatatatctgccaaatggtactatagacaatactatagatagcagtatatacagcttttcagaaaaaaattccagtagttactcatctatattttttacatacagtggacttacagcatacacatcgataacctctacgaagaatgctgcgttattaagtttaagtggggctacaactacttccacaagtttaagcacatcagcaattcattcttataatgaaaaagttgtcgttgtctattatgtgacaactcagatctcggtagcagcaacaactacatacattcctggtttattgaagactacttctactgtctctatctacaccttgtacacaaccgattccaatggtagtagcagtccaattgatattgtagttgtgatgactccagatgtggttactacaagtctaagaagatattatagaaactcatcaacaatatctacagaatccttgttatcatattttagaatgtcggaatcttttaaaaagaatattgcaaccacaaaaaacgtagaaacttccagtgatagtatttagaatactgtcaagactgaatcaatatctcgaataaataggggcgaaactgaagcagatttatcaactggtacaataataaacactcaaaagacggctactgttagtcaagagtcgctatatgtatcttcccaagccgcaatatcaaatagcaggtcaaatataataacattctcacagtatgaagcttcaggttcatcgactgaaaatatgataaatattgcaaaagtgattgtaactcaagagtcattaaacgcctctccccaaactacaaggacaagtggtagattaaatacggtaacattgtcacagtatgaagcttcagctcctaatgctgcatttaaatggccagggtttatgttagaacttttctctatacttccattaataatttagtcaatttctaaataaaataatatacgtgaatatatatgtatatatttacatctaaatatttacatgataccatatatgataatattttatgtataccctaattcctattcagagagcctagataatatgtacataaattcattattaaattttttgaaagataataaccaaaacccattgtacctaagctgaaatctgtcttacaatatcataacccttatcattttgtattaataattctattaagaagatatattttagtactgaagcataaaattcgagagtaaaaaaaaaataataaaaattgtcttaaaatcagataaaaaataaaaaagatcagtttgtataaaaaaactctatttccttgtttttcttgtttctctagctttttcaaccattaactacaatatttggagtataaggaaaagaataaataacttaaagcttgaaaaatcacttttaagatatcaccaatactagtaaaaaacaataattatatgataacaattttcgcttaaaatgctccatttcctttcttagtctttcaaatttaccaaagataaaataaatattagaaaaccaataatccggcagtgtcaagagcagaagagttcttttttttttctttattttcgaagaaaaagaatttaatattaattgattaacaacataataatttcaaacaatcgattatcttgttattccaattacacttttgaatcatcacaatgtctgatatattttgctgcatgcaaaaaaaaaaaaaaaaaaaaaacaaaatggagaaacttattttcatgcatatacataaaattataccaaaagaataattttatcaaaaatttgagtttctgcaggtctccacctcccccgcttttatttatttatttatttatttattatttaagtgcttttttctttctctcctacctatcgtttctttttttgtttctctctctcctttttttattgtttccctaatttgcactgtttctttctttctttttttctttttatgtccactataattgtcgaaaaactcctttctttcctttctttcgaaaagaaacatatccatccatgttaatagtagcaggtcacatttacgttgcatatccagctaaacaaatttaatcaacacactatatataaacgtatacacaggtatttgttcacattttaaaacaaaacaagtcaccgtactctggctgagattcccataaaattattgaatatattcacataaggataaaggaataaactccgacttcaaaataaatcaggttaaggtataacattttttcatatattattattattataattattattattaatatcgataatgatatcctttaaaaataactttatatgctacatatttatactttttacaatattccaaaatatattggccaaacgatcgcttatggccacctcgttggtttcctgtatggaaaactcgttgttaacttctgatagttttgatgttaaatttaatcctgatgatggatctctacactataatttagatttaacgacagaaatagactcatttatttatgcagatatagacgtttatgcgtatgggttcaaaattattacaaaaaatgttgatctttgtgaaatcaattggaaacaattttgtcctgttcacccagggagaatacaaatcgaatctattgaatatatctctaaggatttaatagatgaaatcccaaatatagcatacgaagtacctgacatcgatgcttatgtaaaagtcaatgtccattccgtaaatacaacagattatttagcatgtattcaggtgtttttctctaacggaaaaactgtatctcaaactggtgtcaaatgggctactgctgttgttgctggtatcgggttattgctatcagcattattgtcaacctttggtaattctactgctgcctcacatatctctgctaacaccatgtctcttttcctttattttcaatctgttgtagtcgtagcaatggaacacgttcatagagtcccaccaattgctgcatcctgggcagaaaatttagcatggtcaatgggattaatcaaagtggactttatgcaaaagattttccgttggtacattgattccactggtggtacatcgtcattgtatatgacatccactactaagtctgttctaactcagagatctcttgactatactatggacttactaaaaagaaccataaacgtcctctatggtaatagaaatactattattttcagaggtattaggaggttaggatatgctatgggtatcgaagatacatcaatagttgccactggttttacgttctttgttttatgtggctatgtacttgctggattcattattgttgtaaaatattccattgatttatctgttcgattgggttggttatcaaacacaaagtttcgtgaatttagactgaattggaaaattattctaaagggtgctttattaagatatatctatattggattcactcaattaacaatcttaagcttttgggaatttaccgaaagggactctgccgcagtgattgtgattgcatgtcttttcttaattctatctattggcttaatggcttggtcaagttttagaacgatattttttgcaagaaaatctatccagcagtataacaatcctgccgctctattatacggggatgattttatcttgcataaatatgggtttttttacaccatgtttagtgcaccatattattggtggaatgttgttttactttcttatgttcttctaaaatcgctatttattgggtttgcacaaggctcaggaaagacacaagctttggctatttttatcctagatttggcttactccatcgctattattcgttatatgccatatttagataaaccaacaaatattatcaatatccttattagcatagtcacattggtgaattcctttttattccttttcttctcagatttgtttggccaaccatacacagtctcagctgttatgggctggattttctttatcttgaatgcagcattttcatttgttttattaatgatgattttaacattcactggcatgattatcttctccaagaaccctgatttaagattcaaaccagctaaagacgatagaacatctttccaaagacgtaatgttacctctgaaatgactcatatccttaaatacgatattgatcaagataataaatctggcaagaatactgaaaagactgcattacaagagttagctgcgttgggccaagtggcaagggaacatgatgaccattgggaagatacttttaatgaagataatgatataatcacgagttcttcaggaacaatggaaaaatcaaacaagctttcaccatttattctagaaagttcaccacatgccaatgagaaatcaccatttattgctgatgaagaacaccaaaactatgtaaatatccctaactctagtgttacaccaatggaaagagagataagttacccattccattctgaatccactagtatacccttaaatccaaattctcatgaaaatatcaccactgatgataatactgataacaacactagtttccatggtgaaatgggaattgatcaaacaaatgacatcttatcccataataacaacatattgaatccatttaacagtcaaaataaccatatttcagaaaatataatatgatatggtcaataatttcatcaagtgatccgtttttgtttaattattacaaaaatacaataatcaagatttatttctacttaataatgccatttctacatgattttcatccttatattatcgtgttctttttaaaatatcttttaacatttgacatatattcccatcatggtattttttttttttatctattcctaataatactatcctgtaacttttaactgattgataccattagttttatttattcctatatagatatatatgttttctgcattctgaatatttagctacagttctatatacaaacatacacaaaaatatacatatgtccataaatggtgcattctcaatttcatcatgtttcaatccgacttttactgttataacttactttcacacaatatgataatagtgtaatgataatttcttttctttaatatacagcgccatgctaaatcagtttatatttgaatctataggataattaagatcctctatcctatattcaagccttttggtacatatcctagactcttttttttttttttgactctaatatcatatccgttcaaagtgatcttcgggtaaagttttctctaattctggaaaacaaaaatataataaaaaagaacaacaagttgaaaatatttgtagacaccaaaggtaccaaatatggacttgatcaaataaataaatattccgtgtctataggatcaatacttgctgtttatacaacgattaagtcaattgattaatttgttaatacttcgagagattcaaagaaggaacgcaagaaaataataggaagcgatttgtgttctctcccacctttattgttgtgcttattgttctctctgttctcaagtaatttaaatcatagagtcatccaagcaacaatttgtagctatcacatttgtaacgaactcagattaaactatgaagttcgatatcaaaaaaacttttagcaataggactgatagggtgaaaggggttgattttcatccaactgaaccatgggtcttggttaccctttactctggtaaagttgaaatatggaattatgaaactcaacaatctgtgaaatctattcaagttacagagactccagtaagagcaggtagatttattgctagaaagaactggattattttaggctcagacgattttagaatcagagtctataactacaatacaggcgaaaaaattactgattttgaagcccatcctgattacattcgttcaattgctgtccatcctacaaaaccatacgttctttctggtagtgatgatttaactgtcaaattgtggaattgggaaaaagattggaaattggaacaaacttttgaaggtcatgaccactttgtcatgtgtgtcgtgtttaatccaaaggatccaagtacttttgcctctgcatgtttagatcgtactgtcaaagtttggtctttaggacaatcctctccaaactttactctacacacaggtcaagaaaaaggtgtgaattatgttgattattatcctttgccagataagccatatttaattacatcatctgatgatttaacaattaaagtatgggattatcaaaccaagtcttgtgtcgcaactttggaaggccatgttgctaatgtgtcatttgctgtattccatccatctttaccaatcataatatctggttctgaagatggaactttaaaaatttggaattcatctacttataaagttgaaaagactttgaatttgggtttagaaagaagttggtgtatcgctacccaccccaccggcaagaagaactatattattgcagggttcgataatggatttactgtattatctctaggtaacgatgttccagctttatctttagatccagtagggaaattagtttgggctggtggtaaaaatgctactgccaacgatattttcactgcagtcattagaggaagtgaagatgttgaacaagatgaacctttactattacaaactaaagaattaggaacagttgatattttcccacaaacattatcacactctccaaatggtagatttgttacagtggttggtgatggtgagtatgttatctatacagccttagcttggagaaataaagctttcggtaaatgtttggattttgtctggggccctgactccaatagctatgctttaatcgatgaatcaggtgttattaaatattacaaaaacttcaaagaaattacatcttggtcagtcccattatcttataagattgataaattatttggtggtgccttattaagtgctaaatcagatggcttcatctatttctttgattgggaatctggtaccttagtgagaagaattgatgtaaatgcccatgatgttatctggtctgataatggtgatctagtaatgattatcaatggtaaagagaatcgttccagtgaagaagcaagtgcatatgtcttactttttaacaaagacttatacactgaggcaatttctactgatgaggttgatgaagatgaaggaattgaagaggcctttgatgtgttatatgaattaaatgaaccaataacatctggtaaatgggtaggtgatgttttcattttcactacctctactaatagattaaattattttgttggtggaaagacatataacctttcccattatacaaaagaaatgtatttactaggatatttgacccgtgacggcaaggtatacttggctgacagagaagtacatgtctatgctcacaaagtatctttagcagtccttgaattccaaacccttgttctaagaggtgaattagaagaagctaagagtagtgtattaccgacaattcaagataaagattctttaactaaaattgcaagatttttggaaggacaagagctctatgaagatgcattaaaagtatctccagataatgaccaaaaatttgatcttgcaataaaacttggtcagttacagttagcatgtgatttattggataaaaatgacaatgaacttaaatggagatcacttggagattcagcattacaaaaattcaatttcaaattagctattgaatcctatattaaggcgcatgatctagaatccttatttttattatattcttcatttaatgataaagatgctctagtccaattaggtgatgatgcggagaatctaggtaagtataatctagcattcaattcttattgggcagcaggtgatttagttgctgctaaaaaattactatttaagtctgaaagatatagtgaagctgctatattttctttaacgtacggtttacctaatgatgacataaaggagattgttaaacaatggaaagataaattaattttagatgataaaaaagaaattgccgatagaattgaggttcctggagaaagttctgatttccctgaaatttatcgtaatgatgagcccttaattgccattgattctgaagttaatagtgatcaagaaaagactgaagaaaaaaatgaagaaatatcttctacaaatgcaactgaaatagaaccaactaaagaagaagaaaaaccaactgaaaaggaagagaacacagtaccaataaaacaagaagacacaagagaagaaaatgaagaagacgtatttcaagatactagtaataaggaacctacaccttcacaagaaaagacagattagagaaaataagaattaaaaaaaaaaaaaaggataaaagacttcatttatataaattatatcagtgtatataataataactaaagttcatataaaatatatatctacaaacgataataataaattacttagtaaacaatgcgtaattaaacacaccacacacacatatatatatgtctgagaagaaaataggaaaaagaagaaaaaaaaaaaaaagagtgattatggtcaacttaatcgaaaactttaaatttatctacatctgatctttttttcaatgcaacaaaataaatctccttagattcaagtcttgaggatacaggtttaaacctttgcaccactttgaatacacgctttagtctatgttcgaataatttatcttctttccctgtatacagtttacagacaaaggaaccattaacttttaataaatcaatggcagttaccaaagcagcatcacaaagatcaacagataacagatggtctcgaatggctactcccgaggtattcataagcctaatatatggtaaattagtaagattattcgtgaaaccagtcaatctggggaacggtacatacatatcacttaaaattacatcaataggttgttggttatcatgtgaggagatatcgacatctggagaaaacacttctctatactcttcttcatctttcaactcatgctcaaactccggatccacaatatctgcgggcaaccttggttttagaaatccatgatctttatgaatattatcaacatcattcaaaatataatctaacctactatgtttattaaaatacaatctaattaaatcctgtgttttcgttgataagatgtttgcttgtagactacttacacctttgggaggttcacacggtaagatgtctacacctatgatcattgatcttgcatgacatcgttgcctagctacttcagaccatgaacctggtgcaaaacctagatcaagtacattttgaattttatcagatttgaaaagtttaaatttatcatcaatttcctttaatttgaacgctgcccgagatcttaagttttggactctggcttctctcgtgaaatgatcatttttttgtcttttcaaccatttttgtttacttgcaatagtgtaaaatctgcataattgaggaaatttataagatgaagaacatatctgcaaatgtgataatatcaacaacatgattaacaacaacactttatggtaattaccttttttcctgttctttttctttttttttttttttttttttattttttttcactttcttgaaaggtcagttaattttattttagcttttccttatgtcatacaagaagtatttgataaaactagataaacaaaactatgtatgctaagatatgcaagatattttgtaagtttatattcaccaactttttcaatttcaatttcaattttttatttttttttttcattccattgttttttattatttttttttttttcattattatattttctacagtccatgaagaaagaaaaaaacagagataaagcactaaatacttacagatgttactagtaagtgctactatttctattacaataattataagatgacaatacccattaaacattgaaaaggaaaaaaaaaagaaataagaaaaagaagtgtcattttctttatatatgcattcatcatttgttaccacaaactaatctataagtatgaacatatacaaaccaatgtctatatatctgcatatctatatatatgattcgaaatattctatattaggattacacttcatatatatttaaacttacccacttgaccaataaacctattaggcttacttttactattcgattctttgatgacagtcgagaaaacaaatctctcaaaaaacggaaacaacagagagtcttttatgttttgtattatgttttgtattatatccacgctatttgctgttattgttgttgctactgttattgttactgttattgttactagggttgtttggcgtggtttattggggttgtgtacccttattttcatcttgtatgtgctctaccattacccaaaagggaaatcaccaacattaacaataaacaatcaacaataacagagaaacaaaaatttataatctttcctttgttttcgtaagaaaaagacaatacaaacaatagcttgtctcttttttttttcttttttctttctttctttctttttcttattttctgtaatacagttattatttcccaaaaaaaaataaaaaatcaataaataaataaataaataaataaataaaaaattcaaaaaaatttttttattttttttatttatattttatattcgatacgatatcggtatatagtattaacaacaatttcatattcagtttataattatctaatctgaatacatgctttagctaatacatgttatactacatttaacataatccacatttacaatgtgttattgagtttaaaagaaaataaaacaaaacaaaacaaactttttttagaaaattattatacatatatacatatatccaaacataaatataataacaacttttttttttcttttaaaaaaaaaataactaaacattgtaccttttctatactttatttcttttcttaataatctatattcattttttctttttttttttgttatttccctacacctcctcttcaacaacacttttctttggccgcaactataaatctatttccctcttttttggtataattatccaattattatggttttatataaaagaaaaccaatcatattacctgaccctaggcctctgccagtaaatctggatatacctgtatggtatataaatgaaactggtgaatggttttttacttatgaagaatatttagatagaatggatttttatacaagacaccattttacatgtgaaatcacaggtgcttcatgtcttacattctttcaagccttaaatagtgaagaatctcaatttaaactcgtagaagacaaatttcccttaaaattaagagaacctgtcgctagatatttacattttaatagaatcagaagactagatgccttaatcgaaaacgtttattcaaaatttaaatcaaattttttccctggtgaaattgtgtacctaagaaaacctaaagataataatataagtgaagagacatcaaaacaaaatacacctactccctttccaccttcttcttccattttgcccgaaaattcatctaccactaacacgaccacatctaaccaccagaaaacttatataataaaagaaaaagttcagtttaatccgattattgatcctgtaacaaaagaaatcattactccaggccacgcaaagtatatgcttgtagaagatgatgactcttcagtgtcaaattcaaataaatctttcgtagcagatgaatcacaaatttatagagatagatccactttcacaaaacatctgattaaatgtttcttcaaaattaccttacagagagcatcttcgaaaatgggtgctccttggtgcgttaagcctgagtatttacaaatgtacggtttgacaatggattggcccatcgacttattaccatttaaagatgatgaaattgttaaaaactctaataataatataacttcatcgtcatcatcatcatcatcatcttcttcttcttcttcatctttttcaaaagccactaaggctaaaaaatcccacaaatctaaagaaccaaaagaagaacaaattgctaatacaaatcaaatagacaatagtaacagcgacagtaatactaataaatctaatgatttttcaaatgtaacaataaagagtgaagataatatcgttgataaatctgatacagaaacctctaaaaagacaaagagttctaagaaaaggaaaaataaatccaataatgaaacaacaacaccaatagccacagcatccacttccacatcaagttcaaatattaatgacacgaactctcacaaacaaaataaaaggaggaaaacaaatgacaataaaactgttcagataaacgagactgataatgatgtaagagcgtcttcaactgcccctgaggcctcgaccccaattgttatcagaagtattgtaactgatatggatatcccataccgtgaaaaacccaagttttatttatccaatctctcttcttataataattatctggaatgtatcccacttatgaatgacaaaaatttaaataaattaacattaacaaatttcgatcaattacttcaaatctatcaattcgtaagtacattcaataaagttttatgcatctcatacttcaatttcgatcaattggtagcatcgttaaaggcaactgacccatttgaattacaaggtgaattagtagaagttactttaatgaatccaaaatcaaatcagacagcaatagaagataacaaaactgaatttagtcaatggcaaagaaattctagaattagacaatttattgaagaaaagaatgttttagataatgatctaagttattcaatattaaaagaagaacctgccactgatgatatcatagataattttaattctaacggttctagtctcattattgaaatttttgttgcactattaagattatttattgacgaaaatggtgattggaaaatagtaattatggaaaattggataaataaccaaatttcaatagatgaacaagaacttggaatcacacctaaaggtatccataatttagcaaaaacaacaataatatcatcaacagacacagcggatataataactatggaacaactagatatagattcaaaactagataatccatctaattcaaacagtacacaaaatacaaatgattcgataaaacaatcacaagataataaaaatgaagataaaagaataatacataagcattctgcaactaatgaaatcactaacaaaagagaacaagaagagattgataatacacactttagcgaggaaaatgaaaaaaatgataataatgatgttgataatgaaaattcttattcagatgaggaattctctaatattatggaaaaaatcttaaattttagaaatcaagaatggactgaaaggttaacaaaaagacaattcactaatggaaattggttaattatcctattaggtatcttcgaagacagtttagcaatccctaaatacacaaagtttttaatgcattttagaaaaactataataacatctgatgtatcaatgacacaacttcctaaagttttatggaggaatttttgtcgtaatttctcgttagaggaaaaaataacttgtctttggatactagtggatattgtatcaaatttttctcctgatattaaaaatgccatagaagcttctatggaactttgtatgcatattagaagtgatagatttaaaatattcaaagacatcaaagcagagactgcagttttagctatgatagataaagaaaaaaatcgtgaaaaatatgaagctaaagaaactcagatacgagaattacaaggagaaaaagctaaattagataaaaagttaatggaaaatgattatcaaaggttaaaaccattgggtatggatagatactgtaatagatatttctggtttgacttaactggtatcccaaatagacccttttccgaagatgaaaaggaatatcatagtggaagattatggatacgaggtcctaataaatactgtatcagaaatttcttaaaattagatgatgagcaagttgataaatggctggaaatacgtaaacttgaaggcagttccattgcaacaaagaaggcctttggtgtttatagaagtgaaactggagcatattgttatcatgatccaacttctggggaggatgttgagttgatgtctcgagagggccaaacaaataaatctattattttgactcctattcaacgtaaaattatcgatgaaacaccagaatgtcttcttctagaccgtaatcaatggtattgtgtagataatactgaatatttggattcttttgtcgaatggctagatagttggggaagaagagaacatgatttattgagacaattgaaacctatcttgaatcgcatgagagatgttattgcaattagaaataattgttttgatcctgagttatcaaaaagggaattacaatatatggaagaactagaagattacaaactaaccaatagtgaattaaatttaaacaatattgataatcaggactcatcgattgagaatatcaataaagaagatgatgcaattgaagacattgatagtaaactagaacgtattattgaacaaatcatgaatcttgatgatggttccaaaacgagaaagattcttaatgctatatccaaactagaaagtgaacgagattttctactggatatgaaaaaaaaattactatcggaacgtaatacaagtggtagagttatcgctaaaagtgaacagcagaagctcagaaaatcaagaaataataagttggcaagacgacaagagattttgactaatttaattaatacaagacatttcaaagaattggattctattttatcttggaagaataaagttgctatagaagtatatggttctgaattgagaaagaatgctaataaaggaaaacgaagtggttctagaagaaaataaaattagaaataataatgcacacaaagttatctatcgataatatattggtggaccataaccaaaaaaagaaaaatattcaatttgtgtatcaccttgatatagaatgtgaatatacataatctctaacatattttcttatatacttgatagatatataaaccaattttgatcatacattcattttagatgcactacacttgagtcaatatcttttaacaagtcatccttaacttcatccggtatattatgaagtaatgtgttaatttcagattttttgctgctttctaatacattctcatcacctgaaactctaagtacatgacaacgatgacacaaatctggttcataccaaaagattgaatcactcttattgcaatatctacacgttttctgttttttaatcctgtaaacattttcttgcttactctgatgctcatcagataattctaaattctccatgttttttagactgaacttcagttcattaaatttagaagaaatgaaatgcttagttctttcactcttaaaaattttactaaacatactaattaagtaaccgtttttaatttctgaagttaaaccaagatattttacctcattagtgtctatggcttcgtgtttcttacaaattattactggtgacaatatgtattttgagttatcattttgatcatgtataatagtttgatctaggtgtgttgaagtgtctaataataattccttcttgaataaaagcttaaagtttttatttaacagagcacatgaagcgtggaaatattccagacacttgtcacactggacaagaccaccaccattacggttacatatgctgcattgatgattacatccttcccaagctgccttatcaatattaatagctggttcaaaactttctggatttccatatctaataataggattaaataatgagcacgtaatatggcaccatctaccgtcactagttggcttcaaaaccaaatttagtgaagagataaaattaacattacgttctaattgtcttgaaccttcatagcacaaacagcatctatacactatcgagattattggatttttcttattagaacaaacatcacataaccaactatctgtattctctgcagtaatgaataatttaccgtaacatgacttatgactggtaataccacagttagaacatgttatactatttgaagggatagataccatctccgaacaaactccacattttggtacatagccagtgactgcgtcttgcaaaacagtaactaaattaggatatgcctttgtttgtaaagcagccataatattataaccttcaagttgtttaaaagtatctttttctgtaataaactttgtgtaatgatctgggatctcataatcatttaatgatacatttagaagatcatttttaacaggtaacgaggatgattcctttcgtagctgctttataatttgttctggtatattttcagaatcatccaaaagcatatcaacaattttatcatttaaccccacactcttgaatttattatcaacagtaattttgaatcctttgatatcttccgtgtcaaatgtaactactatatcagacctttcatttttttgacgtattgttttctttattacttcatgggtaatttgtttcaggttattatcatcattcaatggatgctgtactgcatcatgatctttgctatccccattattatttttggtagacaattgaggtcctggggtattaccaaaaaattcaatgcctgggatccgaaaatttggatcacatctttctgctataaaagaagttaaatcagcatgcaacttttctggagtatagagatatttattatatggtcttcttatagttctagtaagaataccatggaaggtcattgattgccttttcatatgttgaaatttgcgataatctttcataatttcccatctttgcctaataattaattctgcatcttgaattaactcccactccaaatttttcatttttgcacgttctggagataatgtgagtttgttaatattattctcctctaatattttccctaacgcattattataacttgaaacacaacctccatgcattcttttgagaacatcaagtggatgtatccagtcaacagcatatcttctccatagacgtgcacatctaatacacaatgctccaattttatctactttcaacgtcttattagtagaccacttttcggttactcccacctggatcctctttttaatattcttatcatcagaaccaccagtaactttgtaccacataggtgaataatcgacattacagaataaacagtgaaaagttttgtccatatatgctactttgtctgtatcaaatgaagaatcatccatataacgcatttcgatatcatctatttcgttatttttgcttaacattggaactacaccagtctccatacttgaaggttttctcaaaactgtcatattattatcgtccttttcaatatgatcatatctatttggtttcttattattaaacactttctttttacctctaactttcatacctctttctgtctttttccaattatagtaaaatcgaacgatcattggcatcgattgtgtaccaacgttcttccacactggtctcagttcactaccatgtttaccaactgcatcttcaaatcttttaatatcttctgcagtaaaagttggttcatgtaaaataggtcttgatatagttttcatacattcaaggtatgccttttctatatcatacttgttatcaaatagagatttagttataaaatcgaggaaattacaattagtaggttccaaatctacaagtggagcaatgtcatttttacatttttcgatatattgatctaaatctgtatccgaaatcttgcttttatccataacccataacaactctgcactatcatccgttcctctaattctgctatcgttttcgttatcactagatttatttgccggtaaagtggccatctggcttttataacatccattccattgatacctttctcctattcttgataatttaaaaggatacggaagatatacattatcatcgaagatatctactaaatatgagatcatatgacaaccaacatattggaaccaaaatttttcagttcctttaccaaacgacttacttataaattgagcagattttttatcaatagtgtccctacaactttgattgaaatttttcagatcttgtaattgcatttctaaaagatttttatcttcaagtgaattagattgttttttaacacaaattgaacaaatccatactatactcttcctaaattttttagacaaaggaggatccatacaatacaaatgaattgtactaccacaatcatcacattctaaagaattatcagatatacaccattcatgacattcatgacatctcttatcccaagttttactacatttattatcctcattattatcatgagcattagtatcatcacaagtatccctgaagtgatcactattcttggggtcacttttataatctttgaaaacatatttattcaaaacttttaaaaaaggataatcttcttcagcaaaaacatatctgtactttttctctaatgcataaagaaaggagggtatactagaaaaattgttcagtaactttccagtagcatatactttatagtattgacgtgtatatctgtcaaatagagaatcaaagtaaaagacatttgatctcataattgcttctctttcattaggtaacacatctgttaattcatctttgtgtactactgtacatttccctctatacgaatgaataggacaaatatcttcatgtaaagaagcataaacttgtctagaattaaaagtggtaatatcctccttgatatctctaggtctataataccagttcattttgacattaaagaatctagccggaaatttagtaactttgcctttagcttctaatatttcatttgtaaattcaggtttaggtaaaaattctacaattctaccaatataataaggttcacctggaggttcagagaccatatatatgctttcgtccctttctaaaagaatagcctctgtattataaacaatttgggctttaatgtcgacaaatgcttcatctaaatctaatacatttgaaaatttactagtctttctatatgatggaggtaataagggtattaaattccattgtgtattcttatcctgtaaaaagctctgatatttaaattttttattcgatccatttgagttggatgaaccattaatgctcccgtcaatagcttgactagaatcagaattagaactataattagaatttgaaacagaattaggtttagattcggggatacccttcgatctttttcttttctttggagtttcagcaatatattcctcagggctattattttgcctgtcagaatcagtcatatagtcagaatctggatcgtcttctatataattaatggatttagatgtagctcttctcttcaaatgtgggcgggttatgctatccaccataatataccctaaatttattttcttgacttctaactaaagctaaacaaaattgtggaactaattaagtaatcaattgtagatccttagccttctttttactaataatcttctatatatatatatatatatgtatgtatgtatgtatacatttatgtcttaaacgttaccttcgctttttgtaaagtttttcctttagtagcttagcatacctctactaatcgtgaagccatttcacttccagtttatttttctaaacgttttcactcttttgccaaactgtaataaatttcattaaagaaaaagtaaacttccccaacaaaagtatagagaagtttgctaagatatcaaatatatacagcaatggttaattacgatttaggtattagttaaatattcttaattatatttgaacgtagatagacaaagaaaaatatacgaatatattcgtgtatacattaaatttgagagaaagtatatagaaaaataaaccagagccaaaaaaatggaatccagaatatcgccagagattcctggtatactccagccaggaaatgtcactcaggacctaaaaatgatgctatgcaagttactaaattcgcctaaaccttccaaaacatttcctggttcgcaacccgtatcatttcaacattccgatatagaagagaaattgaaaacacaagattattatgtatgtgaaaagactgatggtttacgtgcattgatgttcattgtcttaaatccaattaccggagaacaaggttgtttcatgatagatagagaaaataattattatttggttaatggtttcagattccctcgtttgcctcataagaaaaaggaagagttattagaaagtttacaaaatggtactttaatagatggtgaattagtgatccaaaaaaacccaatgactaaaatccaagaattaagatatttgatgtttgattgtttagcaataaacggacgaagcttaattcagtcacccacaagttcgagattagcacatttaggtaaagaattttttaaaccatattatgatcttagatctttttatccaggcaaatgtaacacttttccatttaaattatctatgaaacatatggatttcagttatgacttaattaaagtagccaattctctatctaaattaccacacatgtcagatggattaatttttacaccagtaagaacacattatacaattggaggtaaagattctcttttattgaaatggaaaccagaacaagagaattcaatagattttaaactgatattagagattcctctggtggaagacacctcagtaccaaagagggatcctaacaggtggtattataattacgatgtgaaaccaacttttgcattgtatgtgtggttaggtgggtctgatgtcaacacaaaaatcacaaattttgaaaaaccatttgataataaggaattagagatattagaaaaaacgtataaaaaatttgctgagttagacattgatgatcaaaaatggcaagaactaaaaaacctagaagaaccattaaatggcagaatcgtagaatgtacgaaagatccagatagtggtatgtggaaattattaaggtttagagacgacaaattgaatggaaaccatgtttcagtggttcaaaaagtgttggaaagtattaatgacaacgttagtatagaagatttaggcggatttgtatctgacataaaatctttatggaataaaagaaaggaagacgacaagagaaatatcaaacaaaactatcatcaacaatcaagtaaaacatctataaacaggacaaattaccaaacccaaaatcagaacccaccagtaacctcacagcaacaaatatttactgaaaataaaccacagtatgttgacgacgatgacgactggtttgacgaatagttttgatattcactttaatacggaagctcatacataaattaatcaaattatatatatctatatgtatgtatgtaagatttttcaaaactattttattattattaatgtatattttattgggtttataatgttatatgtatgtaatggcatcttctttttttttttttttttgatattatcaaaagtgtgtttaaatcttttccagtgagtattttttactgtcaatctaaacacacaaacataaatcctttttatatcttttcgtacatattcgaattattacattcaaatgaataataatatttacatggaataaaatagactatacgtaacgtatgtatatagacagcttgattttttataaatgctcttttttttttatttcttatcttcaagatttcaattttgtttatctataggccaaggtaatacttttcaataattctcttggattaccatttccactaataaagaatttttcatccactagcttttctgtatctttatcctgtatatctctgataggcaagatatcgcattgagaataataatctaacaacagtttaacctcatctttattcatctttgataaatgaaattctttaacgtcaccttgcttcaagagattagcgtagactggatcgtaatgatattgcctaatgtatacatcttcttccaatttattcagtccgactggcaaggttctattagtgcgatccacaccagagatggctgctacaaatgaactttgtggattcttgaaaggtattttaccactaacaatattcatgatagtacttgcaatttggaatttcaacgttggtatcaatctattctctgtatctctatatgcggtataggaagatgttaatagacgtgagacattatctacagtgaacaataccgggatctcaatctgtgaataaatttcatcaaggaatattttgaattgagtaccacgtaggcttgggttaaccttgcatttcaataaatccaataaagtatggttatccttttgtaaaacgatctcttggacaccagttaatgtagtgaaagagaatttatagtcactttgtagactaattgctgataataattggtgttcattggcctttaggatcttggacaatagttttttcaaatacattggttgaacataggattttagattttcatcccaaaagaaatcatttctaccgttaagaaataattcagggtaagggatattgatgatcaaatatttagattcaacagcataagcatgtaattgtgccagtagagtgctttttcctacaccaggctcaccagtaatgattattctatttgaattgttaccattgctattagatatattttgaattaatttccctatggactcccttcttattaaagaagagggtttagagaataactctctgtattgattttttttaaaagaaccaagatggtgtaaacattttaattgatttgttgaaaaatcacaaaccttgtttattgattgatcaatcttgatagagttaaagataggtaaagtgatctctttagcatttttattcaatcttgcagtatgcattgtatcaacccaattcttgtataacgtagtggaagtaattctctttgaagtaggctttacatagttcgaggaagctttggagtagccctgaggttttgctttccccttagaagctgcagcattctttgaaactgcaactaatctgatggtggaagtagaaaataattttgtctgtatccttaacataactataaacaactatagaaaaaaaaaggataaaagaataaaagtttaatagtactatctacgtgattgatgcttttgatctacttataattgtttattttatttcagaatattaaatatgtgttagtgggaggtacaccaacaccaccggtattctattaaaggataaaaaatattttcttcagttgcaaatcaactctcaactaaatttaatcctctgtgatgctacacaaacacgtcaaaatgcaaaccagtatacacattctctctctatacctgtatctctgtctctatctctttctctttattttgatacactacaaatctttccttattttactgaatataccatttggcaaaaatttctttttcttagcttttttttttttcatccctttaccaaacaagaaaataaaaataaaaaacttgaggcgatttccctttttgaagaacattacctaaaaaggcaatcaaagaatgaaaagcactaatttggtgcaatacgattgagaaattaaaagtttgtatacatatatttacatctacctacctatctttgtatatataaactgattggtaaactaacatgttgcgttatgttatgttatgttatgttatgttatgttatgttatgttatgttatgttatgttatgttatgttatgttatgtcatactatgtcatgtcgtgccacgagggtgtacggagaatatataatataatgcaaatatttaataaattcttttctatgaaattcattttcgataacagtattcataatgctcttctctttaaacttgagaatttcattctcaccatcactaattatacccctctctggatctgttataatgggttcataacctatcccctttaatttcttgttgtacgaattaaaatttgtctcccttagaatcagcccaaggctaggtgcctttggaatatatatttgcgtactatcaaatgtagagttaatatagttcgaagaaagatcattaaccaaagtcatgacacccatagaaaccatttttcttatctggtgcaacaaaaacgattgtccctttaaaataatggaaatccattctccgtggtatccatcaaagtcgatattgtatggtttgctgacactaatatcaacgatttgtcttcgcatagaatttggtttcacatctcttttcttgcttgaagtataattatgaaaactgtgtgtaccttgaaacctctttaaaatctccttaaattgattgtacttatcctccgataatctatgcttaattagctctttttgtactgctgttaaatatattttaatagaatcatttaatctggatacattcacatcctttatttccttcggctccaatttatcacgtcttatacctaaagttggatacaacttcaccaaattatgttccatctcatttgaaaatgttttattcaaatacaattccaataaatctttcaaatattttctactaaacatcaacatatatgttggtatcatatactcatattccctccaaccacaagcctttctagcattaaaactcttatttactctctgtatattccatactctaatatcttctggtaaattatcgttaatcttattaataatatacaacttagtagtcttatccatattcttaggtatcatcaatttcatagatataatatttgccaatgcatggactcccttatctgtcctggtggttctttgaaacccatttttcctgaaatcattcgaattaatatcagataacaactcacttttaaccagtgctcgaaagatttctccctctatagtgggtctcattatacatgttccatcaatctcatgatgttcattatattgtgatccatagtatttatcaccacaatacccgactgataaagccattctgcattttttcgaggtttttaatatttctcgagttctttatatattattaatataccaagtggcacattatattatacttgttagttgcatttaagttttttttttcttgatcttttttttttttatttgtcatatttatatgccctttatatatcgaagatactaaacacatacggttgtaatgacttgaaaggaggaattcgacctatcattttcgtttttggattcatcaaaatgcagtttgtctactggatttgacgagtttttgaaaacctttttaatttatttgtgagtttacactctgaactggctgaactcatgcatgtgttcgatttgtttaactgaatgagttgcaataaaaaaggatctactttttactattttcttttattttttttccccttttaaacttgtttaagacgacaaactacaaattaacaaagaaagtttctgatttttgttggaaatacaacctaaagatcttgatgtcctgcgttttcccaatgctatttcttgtcaacacaatatcctttcccattctcttcgttattgttgtcgttgttacatcatcaataaataatgcttattagtcttccaaaaagttgtcgttcatcactgctctttccctcgttattgcttaatcaagaaagatgttacagttcaaagggaacattacccaaaagatttaaactgtccaaatcctctcttttaggtgcatctaaacagaataaaaatgataacagattaaattcaaaacataaaaatcgtaccgataataacattaagaataagctccaaataccccatagcaacaccacttttaagtatggtgaatttggtggtttaaaaaaaaatgctaatggatttaacaatgaacagaagataggtatgataaaactaatcgaaaagatcaatgattttgatagtctgaaattgctaccatttacaagaactgttttccaaaacgttatatccagagaatcaatcgctttaaagaataaaaaaaagttggatatcactaggattcgacccactcctatccaaacagtaaccataaagtatttgtctaaacggttgatggatcctaatttgcaagtacatgctattgcagcagacacaggatctggaaagactatggcatatttaatcccaatgatcgattactttttacgaataaaaggccttgatttaacaagtaaaccaacagaggaatggtcaaaaaaaaatggtattcaatcaatcatattagttccaacatacgaattaattcaacaagtgtatgaaacattaatagaagtggctaaagagacacaatttaacgtatttaaatgggatcagaagactcagtatggtgatttactaaataatattaaacataatatcgatattttagtcactacaccaaacaagttgatgtcaatctataatataaaaatgattacacgacctgatcgtatccttaataatgtcaaattttgtgtagtagacgaagcagacaccttgatggatcaatcatggttagatatgactgtacgctgtataagacattttagagatatgaatcatcttatattatgttctgctaccgtacctaatgaatttaacaaaaatttgactaaattctttcctaatgtcgaagtcatcacaacacctcggctacataaattatcatcaagattagagtttaagattattgattcaacattaaacccctttaaaggatctaaaatcaaaactttaggtcaaatattatattcaataagacaagataatacagatcctggatatcaaaaaagatgtataatatttgttaatgaaaaagatgaagtaagaaatgtcactaaaagattaatcaatgattataaacttgattgtattggattgagtagcgaagacacgatcgaaaaaaggttgacttccgtaaaagaattcttgtcagatccaaaaccattgtcaacaaatgacaataatgagaggaatactagtcacaagcataaagattttatgacaagatataatcttgaaaagataccaggatctaacattgcaattcacaatggtgataatgccgatggcgcctgtatatatcaaacagatcgaacatcacatctgaataacataaataatccaataaaaattttggtatgtactgatcttttggctagaggacttaactttcagggtgtacgtaacgttattttatacgatgtaccaaagacatctatcgatctagttcatagagtaggcagaactgcaagaatgagtcaaagtggtagagtgtttatgataactgataaaaaaaccaaatcatgggccaagggcttaccaaaagttattagaaataatgtaactttaatataactatagttatcgaataacgaagagatttgaaaacaaaggagaagtatacaaaagctatactatatcaactagataaggtgaaaagaatagagaaatggtgataaaattttcttattattatttccctgttaatgtcaccagtgaccagattaaaatttatagttataaacatatcatggtaagcatcttccattaagcatcacggtacttctaactacctgtatatacaattatatcttgtttgtcaatagatataaactttaacaaaagaagtacatatatatcttatatctatattagattgctcttctgtaacattttcatttctgtaaagataaattttagagtttaataaacaaaaaaataactacaaattattgcataaacaaaggttgtcaagggaatccggagaacatgtatacagttaaaggataaatgtttcgatttaaagaaataaaaatagaataacaactaattaaaggattcaactaacattatttttgacatttaactctaacacaatattaaaatagttaacaccataccagtaattgaagttaaagaatgaatgtcaacggcaataaacctttaaaaatagctttaattcaccctgatttaggcattggtggtgcagagagattagtagtagatactgctttgggtttacaaaatgaaggtaatgaagtaaccatttttacttcccattgtgatttgactcattgttttgaagaaatcaaaaatggcacattaaaatataaagtgtatggtgatcatttaccaacaagtattaaagaaaaattctttattgtatgctcaaatctaagacaactatatttactttggaaaatgtatacaaccggacaactacaccattatgatgtgtttattgtcgatcaactctctacatgcgtgccctttattcatagtttaactgatgcaaagattttattttactgtcacttccctgatcaactattagctcagagaacaagtttgttaaagcgcatttatagagtcccgtttgatttattagaacaatttactattagtgctgcagatgaaatagttgtcaactccaactttacaaaacaagtgtatcacaaagtgtttccttaccttacaaaagtaccttatgttatttacccatgtgtagatataaatccagagatcactgatatgtctcaaattgataattttgataagaaattataccatatgttggtcccacaaaatatgaaatattatttgagcattaacaggtatgaaagaaaaaaaaatatttctttggcattaaaaagttttgcattatctaatgaagctgtttcgaatggttatagattaataattgctggaggatatgattcaagagtcactgaaaatgttgaatatttgaaagaattagaaagtgttgcgcaagaatataaactaccatttacaactattaaatatcaagatcttatcaatgagaaggatgaagatcctaatgattttgataaaatcaaaatcaggaatactgataaagttattttcttaacttctatctcatcaagattaagagattatttaatacaaaatatggaattattaatgtatacaccagataatgaacatttcggtatcgtacctttagaagccatgagatttggtaaacctgtccttgcttctaattcaggtggtccattagaaaccataacctcatatcatccaaatctaaatgaatctacaactactggttggttaagagagtcaaatccatcgatctgggcaaccgctatcaatgagtatatggaagttaaaaatcaaattgattttaatcataatagtcgtgaaaaggtgagaaaacatttttctagcaaagtgatgtctgacagttttgaagaaagtattgagagaattatacaaaaggaacggattcaatacccatgggaaactgcattagcatcaatttactattttagtttgcatatagctgctttataccttttccctaatcaatattggccatacttgatccttgtgggatatgctggtatctggaggaaaaattatttttgggcatgttattatgcatttattatcatcctattctcaatgtcattagaataataaattaaacaactattgactgattgatttcagggattataaaacaataattcttataaatctttttattgccaaacaaataggaaaaaaaccctgcaaattctcaacgaatatagttatataaaatatctatacatttatataaatatatggtcatgcatgaacataagtactaatgtgtatctagaaaaatatttctttagatctctctctttcttttcttttagtccttatattcttgcttatctatatgatgcccttgggatatcaaattatccaattaactttaccgtttctaaattccattacctgcacttccattctctgtattatctttattactgggggaatttccgatattgactggagaattagtttgtagattagtatttattggtgaatttatagttgctggtaaattcactggtgttccactgctagttacctgaatgcctacattggaaaatcctttaggagattgtattgatttattaggaagcaaagatgatgttgcttcaaatttttgatgttgtagttgttgtttcctcaatgtttgttgtcgaacttgaatatcttgtggtgtaaaactattagcctgattagaagtagctactggagaactttgttgctgctgttgtgctctactttgctgtaagagcattcgctgtctttgtagttgtaacaatttttgttgttgtagttgtaatttctgtaattgttttggagttaaattggacacattaatattaccattaacaatattactgccattgaattgaatattattgtttatattatttccattattattcattatattattttgtaattgtaattgaggcgttcttattctaaatttataatcagtagttctatcaatatctaaacaaccaaccctagagtgaatagcgccataaccgggcgatgtgtaattagattttacattaaacgaggaagcaaacatttctctcattctgaaatattttgttctaaaccttgttgtggacaaaaccgtggattctaatggtaatggaaaagatctcgatataccatttagtacatgtgtagtttcttcctcagatgttatcatagatgtttgatcgtttgtaatattgccattactgctaatttgttttgaagttgaaccattttgtgatgttctagaattattattgttattatttccgttacttacagatacattattcttattactgccgttaatactattatatctctcattgttcgatttagatccacttctagattgttttggattagaatttgcacgctttgcttgattttgagttttttgtaataatcttttttgttccttttgttccttaatcatttgtctttgtaatctttgtaattcttgttgtttggctcttctttcattggctgcaccaatcttggtttgatgttctctatgataatctgctaataattcgtcaaaaggcttagaacggccttcaacagatcttttagatcccattgaatgtgatttacaagttaatgatctagcacaatagcctccttcaggcaattcaacaccacactgtttatcaaaatcaattaaatgtttctcggtggggtttctttgtttaattctcctctcctttttgactttagtattttttttaataggtttagatgtgatattattactatcagaattactatttttctttaaagatgatgtcgaatcatttgaatcatccgatgtatttcctgcttttttaagatctgatggaataggtgtacctgtgttggaagttccccaagttgtcttagatgatagtcttgtgttagtatcgatatcagcatcttcttcatcgtcgtcaccttcatcaacatcctcatcttcatcatcaccattctcttttttattgttctttgcattatcctcttcttcctcctcgtcatcatctttaatagaaggtggtggtctctttttacttgtcatagctcttgatcttttatgatgattattattctcatcgtaatctcttgaattagtatcattatcatcatcatctatatcactagttgataaacgtctttttatacctattatttcctcattattgccactctcagtagtagtagaagatgaaaaagaaggagaagaaagagtttcttcacaatgattatttaaatgttccatcataacacttaataatattggctttccacactgattacatattctataataatcatttgttacagtggaatctaataataattttgaattgtcactgaataaattacgtgattgatcagagttgttagatatccttgtaattccctcattgttagttaataacattttataattatgctttttcaatgaattcaaatgatatttttctataatatcatgttttatacctgtgataatattattagacattataaatctgttttttatttttttttttttctctaaaatagttgagttaaacagacagactggtgtgttctgaagcatctaacaagtgtgcttgcttatttctgttcaaagatagtagtattgttcgtaaatagtaagctatagtcttaccctatgtatgttctattttacataatcaattaattttacttagtttattttactctattttttttttttaaaaaaaatagttaatttcaatttattttaatttattcttctaaaactccatttgagcaaaaaacttagggttaaagaaaaaaaaaaaaagttaggcgcaatactaagcttagtcatgagaatgaataattatgacatatgatagtagtcatattactaagtaattatgtatttacagtcgttgttgttgctgttgctgttcctgatgtctcctgactacatagttgattagatcaaatgctattgcattcttccctggtatttgtattttaatctgcgataaatcgttgttgtttatcttgttgtctatatacaatggatatttcaacgggtccaacttcaatggtaacaaaaatccagtcttatatcgatctatagattcctttatatcttgtgtgtcaaaccattgagcatctaacagctcttgatcatggttcaaatcgatcacctcgtcgtgtccattgaaatttatctgtgcgatgcaaccaatcatcaaattttgtggatacggccaaggttgagacttcaaaataataatattatcagtttgcttaatctgaatgcctgtttcctcccacacttcacgttgacaagacgattcaatggtttctccaggctccatgaacccagctacacatgaatacatgactatgtctttaccaatggctctcttggatctgacaagacacattttggaccaatctttgtttgtgattgctgtgatcaccactgggtcgattctggggaagacggcattattctggaattgcttagcttcattcagtggacatttagtatctgagcatatccatttggtccccccatgaatgaactggatctcttgaccgcattctacgcatcttttaaatttattagcccattggatgtacatcctggaataagagtataatgaagcttcctcattagacatcagcacattaaagacgttctgaaaagttaattttataattgaggaggactcatgattattctcgatactgtggtctatgaaattgattgcaaagactggtatacctttgtatttatctttatagattaaaaactcatcacttgaggaacttgtaaaggataggtacaaccctagaaataccagatgatatcttgtcttatttggattgtttcccttgctgattaatgactccaattcgtcatctgcaattctagtgaaaactgtttcatttatcaaccgagatactttataatttagagaacccgtatcgtcatcgctaaaatgctttgtaatacggtataatttaccagttgttgtatcccctaatggttcaccattgaagaatggtatgaactgagtaaaagaataatttaacgccaattttaaaaatgaaacatcttctcttaaaaaagaaactctattcaagatctgattgccaaaataactgatattattggacataacactgttgctatcgttcattgtatatcttcactttctactcgtatgaattctaatattttccttttttatttatttatttaaaaattttttttttgttgttttcttccaataggtttaaaaaatcaatcatgtatgatactagtacatgtgtcaatataaacctatctatgtatgttggtatattgaagatggatatattagaagatagatattgtattatgaggtaatttcttgcgaaaataaaggaagaaaaagaaaaaaagaaaaaaagaaaaaaagaaaaaaaagagaaggaatactaaatatgataataattaagtaagtatattatcataataagattatataatgatatttacatgatatatatatataatggctgtagataaaaagaagagagtaaaaggagatataaaaatactaaataaagatatattttgtttattctaattcgatttgagcacccaacgattctaatttagattttaatgcttcactttcttctttacttaaatgttctttaactacacgtggggcagcttccacaaatttctttgcttcgactaaagataaaccaagcaaagatttgatttctttaataatcttagctttactctttgtatcaaaggaagccaatttaacggaaaatgtagcttgttcggcttcttcagcagcactagcatcagcaccaccaccactattattattattattattattattattattattatctgtaccagcagttcccacaaagccattttgacctgcagtcatcatcatcattgggttcatcatacctacagaaccggacatagaaggtagattcaaagtcttttgcagatgtttaatcaattcacttgtttccagtaaagtcaattgactaatttcatttacaatagagacgattttctcacttggtaattctccctcaggttcatcctttttcacttcctgtccagtttcgattgtatctgaactattgaatcttctaaatagaagggtagagttgaatttatttgtgttatttaaatgaataattacttgtcttgtagataaagtactcttgattaaaggttgtttaaatatactttgagaaaactttctcatcatctttaattacttgtgtgtatgtgtgaatatgtgtatatgagatatcaaaaaagagagagaaaaagaaagagaagaaaagaaaagaaaagaaaggaaaaaagaacagtagatgttatagtattgtgaacaaaccagaaaacttaatcaaacaactattgattctgtatacttagtaatttttgttgttttttgtcgttgttgttatagttattagtattctcttttttttatttgattctattttattttcctttagttgttatccttgtcttgtgctcatttcgagttttcttttttttttttttttttttttttttattttatttttttttcccgttttcttttcccttttcttcgaaaggcggataagccagccaaaagaaataacaaactcgaaaaaacaaaaaaaaatgaaaaagacagaaaaaaaagggcagatcaattgctcgagcaagaattgtaagtataaatcttccgttattaatatacgatacaataaaagtttacatatatatatatatatatatatatatgtgtgtatctctgtgtgtgtgtgttgaaactagtagcaataacaacaatattttaacaatattccactataaggttatatagttttttattctactaatcttacaataatatgatacattttgagatcaaagtatcttagtgctcgagtcttgcgtgtccaacacccttcattctcccaaaaggaataaaaaataagattaaaaaacccttttgctttctttttcttttcttcctcttctctgaagaaaattcctcttactttccatctgttcgaatgtatgggtggtgcaatagatccagacacccagatgaaaatcaatattttatcacgtgatccagtcttgtctggtgtatgggtgggtgaatttcttttcttttttttcacttgtttctttctttcttcttccaattgagtaataattcaaaaaaaaaaaaaaaatctaaagtttcactaatctctttaaattctacttcaataacatgtatcatgcaatactagtatatgtcgatggatccaactagaccaagaaaagatccattgtaatactaaaaaggggggaaacaaacaaacaaacagacaaacaacaaaatagtagggaaactgggaattgacgtcagtgatatatatacatataatataatataatataaaataatataaaatataaattatttgtttaaatatgactacctttaggttctgtagagattgcaataatatgttatatccaagagaggataaagaccacaaaagattactattcgagtgtcgtacatgttcatacgtcgaggaagcaggtgctcctttagtctacagacacgaactaataacaagtatcggtgaaactgcaggtgtggtacaggatattggttcggatccaacactaccgagatctgatagagaatgtccaaagtgtcacgcccatgaaaacgtctttttccaatctcaacaacgacgtaaggatacttcaatggttttattttttgtttgtttatcctgttcacatatttttacatccgatcaaaagaataaaagaactcaatttagttaataataataataataacacatatagatactcatgtgcatatacatataagcgtatatatatataatgatattttattactttttttttaatttttttttttcgaaaaatcttcattatatattgaaattttactggaatatgtccaaatcttttgcttcttcttctggtttcttcaattcttctttatttaattcgttttttgtcttattgggatgctttggtgttaattcactcatcgtattatacccattattaataaaaatatctgtgaaatcaatttcatttaaatcaataagattaacattttcactattcccattgtcattgacattctcacaattattattaccattattgccattgtcattgttccttaacttcgtaccagcaatagcattatcactatgtatattatggaatggtgtttctaaattgcttgaatgaagattcatcatatttaaatgtgactcattaaatatgggatcatcaataaaattgttaattaataataaatcatcattcacttcatgtaggtgactattataataattattataactattattcacattcacatttatagtattactataatttttattggcaatattagtgtttttattattattattgttgttgttgttgatgtggtggtttgtgttattcacattattgaagccattatcagtgttgtaaattctatcatgtttattggtatttccatgtttgtttaagctgttaataatatgattatagttattatttagaattatatttccagaatcgaacggtccattaaatttataaaaataatcagtgttatatgaatcaaaatcattatgataatattcgtttgccatgacattattattcccgttgtatacataatcatcattaattctctgcacataatttcctaattcttcatcgttctcttcgtcatgaattacatctttggctttaattatctccgtatgactgtcattattacttaatccatagaatgtacttagattattgtaacctaggctaaaattgttttcatagatatgctcataatcactattattcttgtcactattattactacttatgaaattttgcgataacggattaaaattattaaaactagtagatttctcttgtattccccaatcaataattctatttataatagatgcccgatgttgttctagttgttgttgttgttgtgataatattgactgtagttgtgataacggtacttcacttgtgtcaatattattcatattatcagttgtagaggaatcaatgttcagtaccgatgcattatttccttctttttgaataacattattttttcgactcttttgtattattaaatcactaatcgttttccgtttagtattattactattgctcatgacagtgaccactttgctagaactattatgaatattatttgttttcatataatcagtattacttgagatagtataggagctaacgggagtagatataggcttgattgaattaacatttggtataacaatattaaaactttcaatttcattagttaaaccacaatcgcacggtatcattgaagtttgaattggtaagttacgtatttttctatattctaattcatcgaatttcttaatggcttcgatatcattgttttctcttaatttagctttaaatttcttgtactcttcggaatttggatcaaaatttaatttatgggaatgggtattattaactactacaatactccatttatgtcttttcaaagaatatgttgcacgaatacggaatggacaaacattaaatcgcgatatagctcttttctttttcactctcggttgttgtgatgataaactggctaattcttgtgacatagaagtcgaggtttttaaatcattcgcttcctttactttctctgatgtttgcttcttaagatctgtgtcgtcatgaataataaatttctctgcacattcttttactgtatcctcaaatgtagatgtaattttatttggtgttccattagttgaagactttcttgattttctacctctctttgatgccttgcatttgaagataactttggtattatcagatctttcaattacaatttcaatacccattggataaaagattttttgtaaccacggtttaatctcggctttatcttggaaattgggtactggatcgaggtgaatcaatttattctgatctttggaaattaccattgggatatttcgaggggtcgtcagcattgatccatcttcattctttaaaacagggtcatattgctggaaatattttggctctgtagatattgatgcagatgtcaatacagagagggaagttgacgttactgttgatgaagtggaagaagaagataacgatagagtttttgataatgtcagagatcctgtttcctttttaacttcagttttatcttgaatggtttttgttggagttttttcacctttgacaatctttagatcattcttggaattttccaaagaaggtatatttgtaggagaactgggttcagatataagttttttattagaactatttgattgagttaccatagtaattattttaatatttataattttgttttttaataggttttataataaatatatctacaaaaggaaagaaaggcttccgttgaattcttcgttcttcttattttattttctaatttatgttttacgtgaatatatgtgttacgtagtcatgcaatatggatatctatttaataatacaaaacaggtaaaaagttggaacggggttatgatatagaatttttaatgataaatgaatgacttatgattgaaaagaattataaaaggtacaaaatgtaatagagttagataaaataaaatataaatacaccctgtacatgtatttgaaaaaatatactattgaaatatgcctaagaattagtattagattaatagttattctagtaataattaaaaatagatgaaaaatgaaagaaggtttcactaatctatagaaaattgtttccgttataataatactatgttaatttcttaatcttttgaagttgaacttagtctattgtattaccaaaaagattctttcaaacagataattacatatatgtcaatgaatgaaatgtagaaagaggtagaaagtaaagatcgcagagggaaaaaggagaatgttgaagacaaaaataataggactttaaaaaaatcagtcctggttatttgagattagataatattcatttttctcttatttagtatattgacagagttatacttctgaatatggctgtattcattaaggccatacagtgttacaacaataccataacagtaattcttgaaacaacttgaaaggaaataaaataacaaaaaaacacaatttttcacccatttacgggatgtagtttctatggcaacacacacttttccaggtgcacttacttttgcacattgttttcttcttttttttttgtttttcgctaaaatttttcttcatcttctgtttttttttttgttttgtttttttattacttctaaaagcttaccaagaaaatagtcagtttaactcttaggaggttctgattttattcaatgtttttgctttttcaacttacctgaattcgaggctgaagaagtagcatgtgttcttttagtatgtggtattttggtagttgataattcctctatttgcggaggctgtgggatcttctgatccacttcaaatacaggattaatatgagtagaatcttctccatttaataaaaatggtgaatcttccatcattagtggtgacattccacttaacgtgggtggttgtaggggtaagaaatctgtgtcttcggttgtttcttgatgtgatggactttcgtgtgttaagtagtcttgaagatcgaatgaatccgctttattgctactagtattgttttggttaaagtttgcagttatcggatcattattttctgaaacatagtaatcttgtggcgacctaactgaatttctaaaattgcttgtatttgatatattctgagaattacttactggattatattgaagatcatgcgaatctagcataggcattggactcatcagtttaggagtcaagtgagtcaccatatcttctaaatgacgaattctattgtcttgctcttctatattatcttgtaaacgagcgaaaattgcattgttattgccaccagtgttttttccatttaccacactgatattagccgtattttcatttcttgtttctgtttgcggacttgttgtatttgaatttatttcttgtattattggaatattactgtctgcgcctccatcctcaactggtatttcagaaattctgttactgctgtggttaatatcattattgctataaatgtttggcattgtatttgaatatattgtgttatactgttgtcccattagagtaaaattctcattactattaatatcattactgtttgaataggtaactttctttttcaataacagacgatcatttcttttaccattattgtcattttgtttacgattaataatattacggtttggtgatattggctcagatggagaattgtcaatattttctaaactttcaagataaactgcattatatctgcttccactctctgatggggtaattatttgaggactcggttcactgttgcgaccataattgactattccgttaacaactgaatttgtagggtcgctgatattcagattactacttctaaattcattaaatgtgttattgacattagaagtattgttacgattagtgttattaacattgttattaacatcatttggatttatgttccttccattattactattgttgttggtggtggtggtgacattatttggtgccttatccttatccgttaacccatccataatctttttttgatctaaaagaggcatcatagcagccatgaatctaaagattttttccaatatttgttgttgtgatctatacctttctctggcaatcatattttccttccataagagttcgttatctttattaattcttagtaagtctttagatatagcaatttgattgtatttgatctgttctaattcattcaacacagtactaatactattttgtaatggaatagaatctggtccattagtaatatgcaaggtagtgtgagaatttagattatttggtaattggaaactatttcctctcaacaaatcactactattactattattttgatcattttggatggtctgtaataatttttgattaatattatagttgggacatgcattgccattgacttgaatactgttaagatttccatctacaaaactattatgattactactgttattaacattgttgttcattgtgttattattatattgagtttgagtatgattatgattgtgtggggaaccacgttgtctaacaatatgaactaaaagatcttctctacctctaataaaattttcattagcaaattgccatttatcatctgagctaccttgaatggaaccagaccttatatcttggactttatgccaaccgtacatgttcaattgtcttacaaaggaggcgaaatttgaatgcttgaaataccttggtaaaatttcatggacaaaaacttctctatttttaacaataaaagattttccatcatctgcccattgaattaagtcattattattatcgtcatttaccatattccataatttattaatgaatgcaggtcgtgttttatgttgattatgtcttcgatgagttggagaattttgaggaatatgattactgcttatattaataaaattcttattattagaagtagtattagttgtattactaaaattgttatttgaagagataattgaattttttataatatctgcagaatataatggagctgtatttctattaatgcgacctgtactagcattagtattatcatttgcattaagattgctattattggatcgtctcttattgtcataaaaatcatttaaatcattggatgatatatgttcattattaaatatgcctaatggggagcccatacgcataatatttcttatatctgccttagcatctcttgctaacattaatgtacctcttctattattgctattattgttgttcagaaccgttggtttcataaaggcaggattaataatatcttctatagttcctgatgatgcattatctgtaattacactattagaattagagcgactaatattatttttctgattcatagactgtgaaatattgttactatcaccatttactttagaagactcattatttgctgagttcgatatatctactaagttaatagtgtcttgttggttatatacaccagctgtggtagaattattattattattattattattattattattgttgttgttgttgttgttgttggtttccgtagcactgttaatcacttgtgttttagaaattgggacatcgttatgttcattgtttaaaagtgcatcatttgtctcaaatatactatcattatgtagaatactgcctaattcatgatcatacaatgatgttaatttattattctcactaatatttatattgtaattgttgttattagcaggactcacattactcatattattattagtgttggtatctgaattcatggttcttgatagtctaaaaacgtgtatatatagttaaatagaaaatgataaaaagaacctccctagtagtaatacaattgaacttgttcaataagattaaaacaatggatcgactttaaaagtgagtttctagtatggtttatatattttaccctttaattaaagcagtttgttatattattttttatctatttctgtgtataggacgtttgtattgtcctctatttgagatttcaaccaaatttttcctttcgttttcaagattttcttagaaataatatgactattatttaaatacttggacgatttttccgaataacatgaaataatagagaggaatgaaaaagaaggaaaaactaataaagagaaacaaaaaatgagaagcaccgaaagttgttcactcaaaaatctgaagagagaatagataagaaaggagagagaaagaaaagaatacgctaattgatgttgattcctgagaaaaagaatgatatatttgtatgttattatgtgaaagaagatttggagacacagggtcacactcataattatggaaaatagcaaccatattataaataacttaaaacgaataacaacgagccaaatttatatggagtactagatttgttaaacctcatagatataatatttattaatatcatgttattaatatgtgctttatgtgaaagttctgtatttctttttttgttttattgtttttttgtaattcacaatttaaactaattattaaaaacattactgattggaagcaagatgattttttatgttagcaatatcttgtttaatcatactttactgtatatgattgtgttatgcatatttacttctaatagatgaaaaaggaaaagaaattacaaatagtatcatatgagaagtatgcaaatatatagtatatatctttttctatagatatctgctaagttgtagcattgcattattctttctcttttataattcttctccattatagatttattactgtggtaaagcatatcaatatatatctacaagtataaaaaaaattcctgtattcttattttgaaagtctttaatcttatgcttctagttagtttagaataaccgctgagagctgttacaactatacacgattatttaattatatttgtttttatttttgacttcataatatcaaaaaaaaaaaaaagaaaacaaaaaaaacatatgaaataggatagacaagaagaaaaactaaggttacttataacagaacaactacagaagtttcaacggaaggttcaataaggctgaatggtatatttatgggcatattactgtttcatattataaaaatcaaaattgcacggcacactattctatttctatatcttttttttggctgttattctgttcaagaagtaactgaataagtatatcgtttttgtactttcttagcactaacaggtatggatcacttaatattggataaaatatggtataagataacaaatgattctcagagtgagtatattttaggatcacagctggctgattttataagagaattaaataagtcaaccgattccgttattataacatcagatcaaatcgattcggttaataattttagcttaagtaatccagatattaaaatttataaatttgctatcgatgaatttctaagtaatttgattggttttaaatttagtcaacctgtggaagcagtaactgacaataaagaaaaaaatacttcaaggacagaatttaataaaggttcaattttaaatgatataaattatgataatattaaaggccaaaagaagtcagaagaactagagaaagtagagagcattgaaagtgatgacttacaagaagagatagaaaattataagaataagtatgatattcttcggaaggaatttgagttttataagaggaaacaaaccttaaatcaaaaaataccaactagtgaattgaatatagattatgaatatactgttaatgaatttaagagacaaattgaagaacaacgaaagataatgttaaatatatcacagaatattgaaaatagacataatgattataagaataacaataattacaacacccataccaacaaaattgcagaaacaagcaggaatatagataatagcaaaagagataatgaagtgaggaaagatataagtgttattagatatctttaccaatttggacaaattctactggtttttataattgcaataatattttcctcaatattatctaaaattgtttttccattggctaatagtaaacagaaagataattttaatttatatgagaataacatggatatgtttgatatgtcttttcaagtagatccatggtggactaaattcaatacacttagtcatttaatctataagtttcaagattggtataatgatgataactatgatgttgttgatgatatacgatccacggatagtggtataaatgccgtgtacgatgaagtattcggtataaagaacattaactgacaatatcatgtgtttccatatcttagatatatatttgcattatgctcagctttttctaccagactgtatagatttggttgttgctaaaaccctaaaaataaaatattaacttacatattttttctttttgcacataataatggaacctttttactttctttttcttttttcttttttttgcttttttcttagttttgcggaaatgagatcaacattagattttgacaaatgggaaaaaaatttgttcaatttgaggacatttctgtcaagtaataaatataaaagacgaaagaaaaagatcgtcaaacccatttacttctttgacgtgtatcttgaaggatatctttcaacatgtcgaagtgcatcactcgatcttacgacatgataaaatattggtgctgtttacaataaagcgagctgtattttactattttctaatattatacatggccgtgtagcctgtaactttgttgctaatattaaggcaactttaataaatatttatatatatttatatgtttatatgaatatagtgatgatatgtgtcattaagacatacaaatagtggctagcaatttttatttttgcaatgaagtctactttaaataacaccatctttcgggactgatatattcataacatattatatatttatattttgagttaattggcttgtttgttattcgtgtttcgagtgttgattaatcactctgagcgttttaatttagtctttgttccttttgttgggaacctaaagtcactgattactcggttttaaaggcactgttatcttgtaatttcacgtaatccatatgtttgttctggttttaatctttgtgtatcctcgtgggtgcaccgaaataataaacacccagaccttttgttacataacagtcctttcttttatttttttatttttttttcttttttgtttttttcatgttttctcaacaaagagactttcctatttaagaaatatcagtctattcaataatctttttttttttattcagttaattttttgaagacgcaattttctttgatttttcctcaggaataattgcattttccagattttttgtagatgtgactaacgcatctcaataaaacacaaaattatataaatagtgcatttattacgagtggtgttttcactcttcgctcagcttcactatcctatgtaaacaagaaggaagaaccaaccgagcaaatcacaattacaatggctgctgagtatgtctattttatataattgcgtgtgttacaatgttacattgttttgtgaatattccaattcatagatagtcagtattaagtggtttttttattgctgttgttatagcatatatatttcgcaaggagtatatatttgtgattatatcgtaggggattacccgtttgggtcaaagatgagtccatgttaatatgttactatcaattctgaatttcattattcttattcaccaacatcttgatggcttttaatgggttgatagtttcatatttcctgctcgtctctgttattactcccttctatcgaatgaaaagtggtgttttcaattcgatgtgacagttgtatctatatcatatttatcattttttataagtaggttccttttgctaacaattatcatctgctggatttttttaattccaattgtatttctactaatttgtctttttttaaaatagaaagatcctaactccagaatctcaattgaagaaggctaaggccaaccaaaagacccaagaacaaattgcagctgaaagagctgctcgtaaggccgtatgttaacgatgttttttgttttcccgacataactgtttttattctaatggtgttctttctatgatggcatgattcctattattatttcctttatgcaagaatcaaacctgtgtgtctttaacttgtcgttaatctttctatgctatgatgaagattatttgtatcccaatacaatatcgactagtcaatgacgatgttgtcgtaacttttatcaccatctttcgcctgacgtgtttatgattgatgatttgtaaaggcacattatttgtttttttattggaaatgaaataatcattattcacagaaagtgtgttatagattctaacaggaattctgttgaggatattgttgaactgttttacagtgttttttaaaggattacaatactaacagattatttttcttcgttatcattttattgtgttttattgcattaatgctgattcgatttctcttttttcattaatatttgtttaatttaggctaacaaggaaaagagagctattatcttagaaagaaatgctgcttaccaaaaggaatacgaagctgctgaaagagctgtcattcaagctaaacgtgatgctaaggctgctggttcctactacgtcgaagctgaaaagaagttagtcttcgttgttagaatcaagggtattaacaagatcccaccaaaaccaagaaaggttttacaattattaagattgaaccaaatcaactctgctacttttgttaaggttaccaaggctactgttgaattattaaagttgattgaaccatacgttgcatacggttacccatcttactctactgttagacaattagtttacaagagaggttacggtaaggtcaacaagcaaagaattgctttatctgacaacgccattgttgaagctaacttaggtaagtacggcatcttatccattgacgatttgatccatgaaattgttactgttggtccacacttcaagcaagctaacaacttcttgtggccattcaagttatctaatccatctggtggttggggtgttccaagaaagttcaagcactttatccaaggtggttctttcggtaaccgtgaagaattcattaacaaattggttaagtctatgaattaaaaaatgagagaatattaggtctgtttcaaaaaaacattttgtttcttttctaattttccctattcttatcttcaatatatttcattaacttacacaacatttttatatgtatcatataatactgttaattaataattatatgaattcattcatccattaacttttcttttcatgattagaagtcattctaaaaatagtattcttaatgtaatcatttgttcttaactatttatcatctttacttttgtaatgtatatacgtgtatattattaaattatttaatgtaaactgaattacatcaacaagctactttttgcatttaggtctttttttttgctcttcataatgttgtggttgatctcttgataacatgtacatatttgtgttatataatttctatagtaggacccaccactttttaatgaatgtatctcagttgatttttgaaacatgttagcgttttctttttattttttacagattttgatacatccaaaaaaattttttttttaaaaaaatgcgatgagatgatttaacatcaaataaaatatgaatgtcgtttattacttatgtatgtattattacctaagtcacaaaagttcacagaagaaataaaccagcagattattttgtaaacaatcatgaccgtagaccaaattaaacaaaagaatcacaaaaagagaaatttggaagaatctcaagatttagtggttaaaaagaaacataagaaggaaaaaaaacataagaaagataagaaggataaaaaggataagaaagcaaagaaagagaagaaagataaaaagacaaagaaagacaaaactactaatagtgctgattctaaagaagaaaaagttgtaaccaaacaggattcagttgaaccggttgtttctattccctctacaaatgaatccaactatgttcaagatgaaaaattaactgcattatcacaatcacacattgatgctttttatgaagataatgatgttactgttgaagacccagtaaaagcaaacttacgtcctgtcatatcttttgactatgttaaattagattccagaattcaatctattatttctaaatttccaaaaccaacaccaattcaagctgtggcttggccttatttattatctggtaaagacgtgattggggttgcagaaacagggtctggtaaaacttttgcctttggtgttccagcaattaatttattgataagtaacgctcaaccaaaaccaaagggagttcaagtattaattatatctccaactagagaattagcctctcaaatttatgataatttaatcactttaactgataaagttaatttagaagcatgttgtgtatatggcggtgtgccaaaggatgagcaaagaatgaaattaaagaaatgtcatgttgttgtagctaccccaggtagattattagatctaatccaagaaggttctgtcgacttatcaaaagttaaatatctagtacttgatgaggccgatagaatgttagaaactggttttgaagaagatattaaaagcattattagggaaacagatgcaaagaagagacagacattgatgtttactgctacttggccaaaggaagttcgtgaattagcttcttcttttatgaggcaacctgtaaaagtatctattggtaatagagatgaattgactgctaataagagaattactcaaattgtagaagttgtcgaaccacgtgccaaggaaaaaatattattaagtcttttaaagaagtatcaatccggtgctaagaagaacgacaaagttttaatttttgctctttataaaaaggaagctgctcgtgtggaaagaaatttgaggtataatggttacaatgtatctgctattcatggtgatcttactcaacaacaaagaaccaatgctcttaatgaattcaaatctggtaagactaacttattattggctactgatgttgctgctagggggttggatattcctaatgtaaagacagttattaacttaactttcccattaactgtcgaagattatgttcatagaattggtagaactggtagagctggtcaagccggtgttgctcatactttgttcactgaagaatctaaacatttagctggtgctttagttaatgtattaaatggcgctaatcagcctgttccagaggatttaatcaagtttggtactcatactaagagaaaagaacatggtgcatacggtgcattctacaaagatgttgatatgacaaaaaaaccaaaaaaaatcacttttgattaaaaacttgataatctcaaatttttagtatccattagatagagaaagtaaaaagataaacgaatgtaattgtctctgtatattattattactcaataaaactgtttataaaacaattttaaagtgttattatgactaagtatatatatatatgtgtgtgtgttgaattattcttcctatgaaactgatttatatgtcttatgattaataaatatggaggtgagtaaagttaatatggaagaccattattcattatcctctgtgttaaaattacgttccataatattttctcttgttttattatattcgataggatattctgtccttaagataccattgattttttctatgctttttttggcataatctaagtttttttttatatttctagatacctcaactcctctttcaaatcgttcttgtaaggataatattttactttgtgtttcaccaattaattgctttaactcaagacttttggcattgatttgtgctgatgtctttgtttggtaggctaatgattcagaaaaatctgcagattcaatagcctgttttaatgagtcaaagatgtattttgatacatctatcatttgatttggaccttgctcatttattaaggtgaaagtattacttgtaggtttgatattactagagtgtcgaagaagaatattttcattatttatatgattttgtaatggttcattggtcctgtctaaaatgtgattgactaaattctcttcttcatttaaaagattgttttcaattagatttgagtttgtaatatcattatctgttacatctacctcactagacagataatcgttgctattactacttgaggatgttgaaatttgataataaatgtcttctgtaaatggtattgcataattttgagagctaatactgggtacttgtgagtcctccacattagaccataattcattggaagtagattcggtattcattattgagcaaatgttgtacctacatatgtatgcaacgcttggggaatggagggtcgtgtattttctaaaaaatcactctagttcaaaaataaaataaatgtcacggtaatcttaaataatatagtataattccatatattaaagatggttttcgccatcaataaaattaatctgatatgcaaatataaaacatttagtaagcaaataaaataaaagtctatttttgaagaatcaaaggtttgtaaataataagtattccgataataaggttaaactagataatgaagatagtttacaaattatccatatatatatagtataaatcagaaaaatgttaacaggttgaattcaggtcttagaaaggacattcatataacgattgccgatgaagagttaaaatgatagaggatcttgtatatcacaaagttgcctcaccttatatttgatcatctttattcaataatgagtaaaaaatatatagtaggattaaaaatgggcatataaatattttatttttttactaaatacttttatatacttatgtgtctctaaaaaaaattggacaggtactaaatactcgttgaatgtataagatatcatctaagtaattcaaatgaaaataaaaatgccaaaggtgaatggaaaatacagataaccataaagaaaacctaaggtacaaatagaaaacaaactgattaggaagaagaatcattcattcataatttacatgatagtacaatcagaacttttctttccattaccagatttattcttcctggagaagagtttattttttaatttcttcttttctttatttttattcatgggatcaggattgtacctatctgctctatcgaatttagattgtctcccacgttcattacgatttccattattgggtagcctatcagtcctatatgtgtttcttagtgctgcagcatattcttcatcttcctgttcttgtaatcttctagctaataattcgtcatcctgtaattgttgctgtggatcatccccttgttgatgtacttgattatctcctatattgtcctcatttttatcatggaatggattagatatagtatgatcaacttgcatgggatttgatgttgttgttgcttgagtcacagttctttcaatactagcaggaatgaaatttccagtataatatgaatcctggttcccgctaacagattttaatgacttccagacaatatcattagagtcagtatagttattatctactacaaggatgtataattcaccattatttttgtgcaaagtgaagtatccgtcgtttctatataaaacagcaaatgatttttcaaccataatctcttttaagtgattcaaaccataatctgtcaattgtgtagctgatctggctaaaaaggatttcaaatagtttgcatcttgtaatattgcatctgcattagcaatttgtatattatttttattgatatcataagattgtacaaggactctctgtgcattctcatatgagtacttagatacatgatcgtacgctataagatccaactcaggacttattatccaaccatgtaccaagcccacattgtataatctgaatattgacatattcatgccatcttcgaaagaaccattgaaaacaggatcaatagttagagtctcccattgttggaaatttgggtttgatgttgtttctgtatgatagcataagttcggcaaagtttgtaacaattgattgatattaattgtattattttgttgtacacctatgtagcttaatgtttgaacaaggtcgcttttggatacttgttgcttactattaattaaagtgattaaatttcttgccatattggctagaccaggagataacaacaaaacattgcataatgctagtaaggcacaggaagcagcgtcattcccattattttgttctacagcctcattatgtaataaaattgtatattcataaccgtttatagaaactttcttggtgttaaacagaatgtccatttgtatatttgtacttaatgttaatcacagtgagtctaaatgattaggggagagggagtaaggtagaaagatataataaaatcaaaccaatatataaagagatataagcgtagtgtcttcttgcataaacaataactggctaagtaacttgagtaattggtcgaagagttgaaaaagaatggtacatttgattacatggactatatctttttccttaaaatatttatactttactgattccatcaatctttctagtcagttaattattgactgagtcaagttttttcctcccttttatcaatttttttttaaatttgatctgccaaggcgagagaaaaattactgaaaaaaaaaaaaaaaggaactgtttcgaaccctcgaggaagccatttttttttctcaatggttatagagaagtaaaaagtgcatacattatattggtattattaatgatattgttaatgattctattacatagttgagctaaggtatgttatttaaaagtcgtgaaggtttacctgttttttttgttttttgggatatgaacaatcatgacttagtaaaataaaatgttaactttattttgagggtgtctttatttgccttatcaaagtaaattgatgctaatgtattgtaaataatggggaggggtttacattatggttaacatttagaacattatagactataaggaggtcataatgtggttaattgatgttgttagttctggtatcatcctattcatgaactgctaaatttcatggcagagaagacgttcttcaagaggatatgtagcatatcttattgaatttccatctttgatacatattcatgctttaatggtacataataaaattgtggtatcaattcattaatttgtcctctaacactgaaaatctttttttttcattgttgtcggttcttgtgatcttatggctatccctttttatttgtaaattatcttggacaataaggaataatttattgtgaattaaatatacatgattaaaaaaatcttttaaccacaaagataacaatcggccagataaagacatctgccgaagcaagagatgttcttgtaagcttgttatattaatatattgttgcttccttgctgtttgctagcactgatggatcttcgaaatgaacaagaaggtatatatatatatatattttatgcatttatgtgtatgaaagatactagtacatgtggatgagtcttttttgctctatataagtgaatctgtagtagtattgtttagcataggcatagtagtatcaggggaaccttttttagttggctgcagtgacacagaaaatccaggcggaaattttggatgattattattatttgttgcgggcgaattggttggattggaaactgaaaaacacgaggtgtcagctgcttttataattgaaggagccttggctagagatgttgtaactctatgttcatttgatgtagattcttggttaaaagtacgtgtgttacatagagttttggataacggttctaaactattggaaacaatcaaagttggtttactagtggaaatggttgaggatatgggtgtatttatagaagattttgctacttgatctttagtatcccttttcattcttagttcatgtatttgtttcggagaaagaatagacggttcagaagtgttgttatcttttgtattatcttttcttggtgtaataattgagcctaccttcttttttgtaggttggataattgcaacattcacatttttgcttgcttcattatctagatcagcaggtttgggagaattgtttttgctttcaatgattttattaaaattattactattactgttaatacctttgttatcattataatcaaaattatcattatttaatttttcactatgagatttttgaatatctgctgttaatttatttatcactttcacaaattcggtatattgatacttttttaaagtagaagccattgaataattccagagtaagggtaagaagttttctacaaggacaacttcgtcagtaattaacgttggtattttaacaaataaagccaatgatttcaaaagaattcttggatctctggtcttcatggttttgaataaaggtaagatcttttctgaacaggtatatgaatcaatggcttttctttcgattaatatttcaaaacttgtcatacaactcattttgatggttaaacttgttgtcttcgtaaacaattgacataagagaggtaatatttcatttttaacagttgggaagtcataacaatctaaaattaaagaggtttgccctaataatgtctcttgaagctgtatgacattgtccttatcacatttatctagaatgtactgtaatagtggactcaaaatgtattcagcaaaactttctagtctgatcttttcctttaaaaatgatatgtttgtaataagtgtcattgaagaatgttctaacaaaatagaaaaagtgtttgtatcactaactattgggaatatcttttccaaaaaagttaattgtgacacagtagaaccaattttaataataatttctaaatcctttgatatactatgagaatcaataattttctcattagttagctggactaatagatttaacagaataggtaagaatttacgctgtaataaagttgttggatactgaggtagtaaattgatcagaccgtctaaaaaaataactctctcctcattagtctttgttggtaaatcatccagaaaatttaatgtttttattaatggatcttgaaagaaatcgctgtctaaaaattctgttatattctcatatctagaataaatgtctctattcattaactttggcatacaggctcttaactttactggaactttaatgaaaatattgtcccaagaaagactacttagttttttctcaaatctattataagcacttttataatcacttaaagaattacctgccctaataatagaattgttaccattgtataagaaattaatcaataatgctaatgagaaataatcatttttaaaacttaaggtattttcataaactaattcaggtgcagtgtaatctagatttaaagtataaaattggtggattcttggatcatactgcggaaacatatggtctgctgaatttgtttcttgtggtaatttgataatatgacctaatccagatattttccaatctaaattttcattaataaatatcgatttgggttgaagattcaaatgaacaaaattagcgcggttatgaataaaatctaaaccagtaattatttgttgtattcctctttgtataattatgtcgtttttaatgaaactttgtgaaaataattgattatcactagcatcttctttgaaagcgtcctctaatgttccagtaacatactcagtaacaaacataaactttttgctgtgctcctctaaaggttcaattaaagttaaaatatttggatgttttaacttggctagattattgacttcatttctcaatatttcatatccttcttgtatcagttgtttatccttcaaagaagattttgacttgataataccgtacttcaataaataattttcaaactgttttttatcaaagacaaatatagacactttgttatttccagttgaggatgatgatttaggtctgccagtaaagactgaccaaggttctgcaataaatgtgggagatgaggaaaaagagtatttatttgaaatcccagtttttgttgaccaaaacatcattgttgaactcggatatgttttcttttaacttcacacctacagttaattactcctgctcagttaatcactgtttttttgctgtgaaagcaatgaattttctttgtagaagaaaaaatgaagaataatggatagtacacagtatttttgatagcaagaaacctaacaactatatcttttgtttctttgtcttacacacctttgtttgaatgaaagaacagagttgagagttgagagttgacaattggaagttggaagttggaagttaaaagtttgtgtttacgatttaaagatttttccagtttgggataaaagttggaaatattgattgaattggtttctttttttttcttttgaagaaataacaagcccaagataaaaagagtggattggaaatttgatatgtatacatgttaattccggtaacaatatgatgccaacatagattataaagaacctgaatataatataggcgataaatatataaaaacctaaataaattaataaagttttaatgaatttacaatgttacaatattaaaataaaacattattaatatttaagtataaattatgttaatttctttttatttcaattatgtttttttcttgaattgaccaggagtctgaatacttttttggatccataaccctcttctttgagatttggcaaggaattcatgaaattgatatatctttttcttgttatcgaattctgcatccatttttccctcatacacaacagcaaggccttcctttatcatttgtaatccaatatccttccatcctccaacccacgaccagtagactgttctggcaacacaacgattatattgatctattcttaatggttttatccatactttcttgttcaacaatcgatatcgaagccaatttaatgcttcatcgccaaatggttgtccttggtttccaaaatgtgctctctctggtgcatcaataccagatattctgattggaatagtcggtaaacctcttctccccttgtatcgtggttttaaattcatataataacttgactttaacttcagattcctttgggaggatgacattgaagaaatatcttttatccttttagaaaatgacttgaatgatagttgatggaaaggtttatcagaagctgtcatattttttgaattaataattttcattgttgtgtttggttctagttcaggaatctttcttaaccagccccaacctccaagaatcccaccaggtaagtgataaaaatgaaagttatccccatctccaacagcagttactttcccatataaccatttcttcctaaataaattagttggaatatcttttacatttcgatattgtttaagatatctgttataagttaaatatgacccacccaaaaaagttaatataagtgatgtaccatagaatgtatttaaggatattgttatgacttcattattaccattatttcgagttgacattgagacaaagttaacgttagtatttacaagatgatatatattttaataatttaatatatctacatgaaaaagcatacatatctatttattgtaaaggtcatttcttctgtcgtaaagcttttaaaagattggatatctttataaaaagtatataagtaaaagaaaaaaagaaaaaaaggatacaaataattagataatataaatagtggctaaatcaagatattaaaatagacattttaaatagtatgaattcgtagtaaagtttaaaatcattagtaccaatttcattattaatgtacattcattagtcttttatatgcaaagaggtatgaatatatatatatatatgttgaatttagagaaaagtttaaccctttctttttttatatacttatagatcatttattaataatatattaaggtttagatgactcaacaacaaccatatttcagactgaagatacaatatcgaaaaatcggtagatatattaatgtacaaaaagtgaattatattgcctgacatgtgttttactaattataatgtaaattattttaattaacagtttcctgccaaagttgtagtgttattgtggcgaggaaacaaggaatttgttctctttgttctatccacgtagataataattcttcccaattgcttaagttcaaatttgatactaatgtgtttttaactagatctaaaactaggtacttatctggtctaaaacaggaatatattttgactttgttattttgttggaattctagcttgaaaccaagtattgaattaactacttcaataaactctaatgattttttattaaaaaattctcttaaccttgtaaatcttttatttgatttaaatagttctttttcgcattgtcttaattcaaactccattgtcttcactactgataatggcacacttttaatatctgctgttgaggattgtaactttttcaataaatcctcgttttcttcttttaataaggccaattgttttctttttacgaattgttcttttgctaatggattgtctcttaattgtaatattctaatttttttctcttttaatattatcaatcttttcaatttttcatcaagtaatctgtttaagttcttatatttgcctaaatctctatttaatttagcattttctaattgtaattcatttattctttgagagtaatatgttaatccactggactgcggggagcctcctagcttacgtttcttattattactatctttttcttctttaagagaatttgccaatttttcattcaataattttagatcatttgttagctcctctgatctattcttataatcatctacaagagtctctaaacctttttgtactaattctccattatttttgttattattgtcgtcattattcctactatcattactcaaggtatcttgatcaagtttaacaaattcatttaattgattcctcaataatttacattcctcatttattagtactttctgttgttcatattcataatttaatttttttaaacttagaatgttaatttcatatgtcttatttaaatctaataattgatttctttctaatgctaattcttcatttagaatttttaaactattaatattaatatttaattgattgttttcttcaattaacaccacattttctttcttggttaaacttaattcatgaagaatctcacttggattattttcttctaagacataatccctattgttattctcttgtgaactattctgttcgtctttaataatattattggtgtcatcattatgattgtctttatcattatttttttcttcttttgctcgatcttgatcttctttttgctcctgctcttctttatatagattccattctgctaatttagattttaattctaataattctaattgagaattttgataatctttttgtagcatttcaaattcttgcaacttcatttgcaaagaatccacttcagacttccaatatttacttagatcagaagaattctccaaaactttgattctttcttcttgtcttctattagtttcttctagttgtgttgtatatttaatttgagattggaatagtttggtaatcgtggttaattcgtcagtttcattagtagatgtggtatcaatatgtttattatttacattaggtccattagaactagaacaagtatcatgacttgagttgccactatcattgttgttaacggtagtggtagtggtagtggtagttatgttagaattagataataattgttttaaacatataatttcttcatctttttgattatttgcattggtcaaggtaactatctccctagattgatctcctatagtggcttcataacgatcaattgactgttgtaaattttgaattgtaatttggtaattttcagcatctgattctaatttatttatcttttgatcattattaatctttaaagtattaaatgattgtttccttccaattaattcagaagataattcctgaatcttttgatttaactctgtctccatttgattatatttattttcacaatttgttaactgttcttggattttttgttctttctctttcatatatattacattactatttgataactctaattcttctaatttagaattataattcatttctagatgattatactttctttctaattgtagtaatttcaattcaaagttattcctttgggtttctaatttatactgtaaagatagtatattgtcctcattattgtctcctattaggttattattgtctttgttagaaacgtcatctattaaaagattatctttttcgatcccattagaaggtgtgtctatgaaggaagaagatcttcccgaatcatcatcgtcagaagaactgtgttcatttttattcaattcgttcatttgtatttaatcaatcacttgaaaagattaaaatgaaaaaaaagaaaatacaattgttatttattgtagtactagtaatgctacaatgttgctttcttacagaaaacttatcagtccaatcaagaatgattttaatagttcggtagaaaactgtatcttcgtcttcttttgaaaaatttcagtataatttgttgtgttttgttttattttgtttgatatttttttttctaaattttctttacttcccaaagagagaagaaaatgtgaatttaaaggattgattaaattttttgtataggaagtgtttgagagagaatgtattaataactaactttttctttcaataatatgtttctttaacacaaggtttttgagtagttgcaagttattgagagaatatattctagtttaatctagtctataaagtagttttctgtatttatttcgatatattagtgttatttctcgattaatttacaaataacaccatttttttgtaataaaagattttaaatgtccaaaatgtatgttaaaacttattaatatatatatatatctgtgtgtgtgtttgtatgaatattctttttactaacttactggttgataatataactggaacaagttaattccaattatttttgttttgatatgtccgtatattaccttcacttatgttcatttaatttaagtttttgatttgattagtccaagaagttttagattattagaggaattagaaaaaggtgaaaagggttttggtcccgaatcctgtagttatgggttagcaaatagcgatgatatttccatgactaattggaatggaactatcctaggccctccccatagtaatcatgaaaatagaatatattcgctagctatagaatgtggtccaaattatccagatgaacctccaaaagtcagatttatctcaaagattaatttgccttgtgtcgatgataagactggtaaagttatcgtagataaattccatactttacgtgattggaaaagatcttacactatgcaaactttgctactagatttaagaaaagaaatggctactgctgcaaataagaaattggtgcaaccaaaggaagatgcaactttctaaaaaaaaaaaatagtcaagacactttgtccgttaattttttgtttaactttattgcatatttttaagtcatgaaatgctatatttttgacttactgtattttgttgtgttttgtttttaaaatatcaataaatcgtggtatggttattattttttgtttttttctcagtaaaactagcgctaatgttaataataatagtactactgttattactgagatatcacaaaatatatatcgaaaaatttaaacataatagatataactcattaaaataaatagaaaaaggtaaaagattcgaaaattacctataatcaatcattttttactttttatcattgcatctatctatttacttttgttcctaaaaaaattttatgatttattagtattgttttacaaacaacaacaattatccttgtgaatagattatactatgttttatccaaacgccttctcctcaaacatttttttttctcattgttacttgacatttcaacgcttttatttttcttgaatagtttacatctattgaaatcaaataaatatcggtttcaattaagagaaatactttgaggaaaatacttctgtccttcttttgcctttttgccttatgctttttctgttgttgttgttgttgtttttgcagtctctttatgtggttaaatagttgatttactacgatataataatgttcattagtggcccaaataggaaagaaagttgcaggtatgttatagttaaattaatagcaataaatttggataataaacaaaatggtacaaattgatctatagcatgatggtgttccaaatcagattttagttgtggggttgcgtatcatacagaatataagttttcatcactgctatttagcactatttgattttactatttatggtcactaatgatgtttcatcagattttacaatggttgtgtatgttttaaatttattcacaacaaggtaactaatatatgtctattttaattctactattgaaaatatttgtaattatattgacgtttcatgttttgaatctataatgaagttaaagatgatagtagtagaagtattaaatttcaaatagtaatatcaaaatgcctcttcatagatttttctttgttcttattcaaaaatatataaatcatggtagatcaggaagttaaattatccattgagtttcatatttcataatataaatttttcttacaaattataacaacataagacaaataaccataaagttagatacacatacccacatatttatattaatatttttggtaattacgaaattattttttactgttaaaaacagaggaatcgaataacaccatttaaaataaagatttataaattaacaaaaatatgaaattttctactattgcttgtctttctaccttagtgacttccatctttgcagccccagtggaaacagtgcaaaatgatacacttaccatcccaacagaagctatcattaattatttagacttagaaggtgctaaagatattgcaattctaccaatgtcaaatgctactgagagtggtattttatttttaaataccactattttagatcaagcattgactacaaaaaatgaatcagcttctttatctaagagagatgctgatgcttggcactggataagattggcttggggtcaaccaatctacaaaagagatgccatgccagaagctaatgctgatgcagacgcttggcactggataagattggcttggggtcaaccaatctacaaaagagatgccatgccagaagctaatgctgatgcagacgcttggcattggattaaattagcttggggtcaaccaatctattgaaagtttcttttcttttttttatttttatctattttttttcctatgatactagaatgaatcaatcgtaggtgatcaaatatattagtccctttatattataaatttctctatttcttctatataattctgtctttttttgttcattttgatgattctatatatgtttatatagatatataactttaaactttttaaacaatatattttcacctttatatctcgaagatatttatatttgaaataacaatttttttattaaagtaactcgtaacagttagaaataaaaaaagaaattcatgatatttggaagtgtcaaaataatataacttaagaaaggagataatatgcatcatcttgtatattttataaagtatttaaaaaattattgttattttcaattcaataattttaagagttgcaaaagaatgaagttaaaaattatggaataacaaaaagtttttcgactaaatataaattaatttttcaaagccttttgtcaaagtactgatcacactttaaacaaacaatttcttgtattggcagaacataacataattcgaaaaaactatcaaaagctctatgacttattaacaactcatagacaatattttcctattaactcatcaaaatctaaattattcattattcacccaatttttattcaaagtcataaagaatcacatctgagatattgccaaaattagtaatcatgattgaataatacagctattaatatatatgttgcaactaaaattcttgtatttgtcctatatatctaaatacagaaatataaataaaaaaatagtatatggttatttatactattcggataaaatttgtaagattattttactaattttttccatgatcttaatacataatctaaactctgagtaaaataatctattccaatcttatcattaattttctcatccttttatagtattaggggctttaaatttcctaatgcaaattagttgatcctcaatttttattggaattatccgtatgtttttgttcaatattttcaacacagacattacatatttataaatcatctagacaaagtcacttatagttttttttcaagaattaaggaaaatatccaaatagtcttaaaaatccatatcttatgatcttaatgaaatgtcttcaactaataaatttaattgaaataagtaaaaaatattattattataactaattaatagcatcgttggttatttaattacacatgaatatttattgtaataacatatattaaacacaaaatatattccaaaaaaagagaaaaagcaaataagacaatcaagtttacaatatacgaaaattcattaatgaaaaataatgcacaaacatatatccaacatcatgaatcaacaaaaatattcttttgttataaacccacttcttttatcaaataaaaatgttatcgagcataagatatatctcttttgataactctaacctctatatatttttatcttaccatttattaaataaaggttatttcagagaatttgtttcttctactatcaaagaaatataacctagtaatctttctacttttgtaaaaatacggctattggtaaacgccaaggcttcaatcctacttcttagtgctaccatccctatttccaaacataatttgtgcataacttgaatagtaatcacctgaaaattatcataaaatctactttgatatgatatatattgcactaacaattcaataactgtatcataatcaagtggaattggatcatttaatgtttccatcctaagaaacaattctagtaaagttcttacacttacaacatcaaatcttgctttgatacttgttcttaaacatataattgcattatcccattgccatgtccttaacatagttaatcccaataattcccattcaagaccactgcgcttcacatcctgtttctcagatatatgtgtggtaatatccaaatcatcataaatatctaagaataattgatctagccatctttcgcaaattcttttttttcgaatggtcaaaggcgtatcttttaatcgtacatatccttttatatttttattattttcgacactgttgctaccatcattattctcattcttatcagtattgctagtagaatattcactttccataataaatactttagaccttagttctaataatttattccaccccaccattagtactagttctatcaacaaattataaactttacgttgagaccaattatattgttttgatatactatttcgactcaataatttcatgtcatgtatggactcaacttccttaattggtacgtaatttatcaaatttacagaatgtggtccataaattggacctatcttcatacagatattatcccatatgtcttctatataaccttcctttgaatcgttgggcattacaattctcccgaatataatattcttcaattgactgtccttcatatgtttcatggacctacttaaaacatcaaactcattggataaaagacttcttgccttatcagaatgatttatatctccaagtggtcttacataatattcatatagtgcaacttcgtttatatagcctttagttattttatcatattgtgggaggtttggcattgaatttaatgtaattaatgcattttcatattgctgtaattgaatgtaacatttactcagataataccaagaatcaaaagaatccaaggccaattcagtagattttttggctacagttaacgccaattcataatcaccattttgtaataaaaaatcaacttgtaaatttaggagatcagacatacaattcaatagctgaaatgagtttatatcctttggttttaagctatctaatacagggaacaaaggagctaatgtatcgtttaatattgtaataaaatcaaaatctttttcgctatgttgtttcaataataaaatcaatgcacatttataaaataatccattgttttcatcttcaatactcaaactattcaataaatcaatggcaaactctatcagatgaggaactatagatataaatattgataaagcatccattaaataattattaaatatcgtcggatgaacagatttagtactatcccatccagcatccaaacacctgggtaaatatttacaaagtagagtaataattctctcacatacagagataccacccaaatctattcccaatggatattcgactagcccaggtagttttctagaaggatcattattgataattaaacttctcaaacaagcactaacaaacaattcttcccatattttctcagttaagggaacctgtgtaacaccatccgaacagttaactgcatacgaatagaatgtggatttattatcatattcatatcgtatccttaaatccactttactaaatatatttaaggaacaaaatgtagctatgttattatgatctagaccactactggtcttctggcttgtcttcaacattttcattaatgcaattgccatgttttcattcgatacatccatccctgtgacataaaaatattgccctacttcttcctgattaaaattatcataaatagtgaaatgcatcaaatctggtggaccaagacctatcctatccatcctactaaatttctttaataaataatttctaaaacctaaactttcaccgaatctatgttctaaaatcctaggaacatccataggattaaataaaattttattctgagttatctttttactatccaactccttggccccctttaggttaaaacttttggactttttgttatcatcattcttttcagatgtaatcttagatacagacttgttagattttgaaaacttgggtttccaaatataattcatttctctcctattccagtaagtttccaactgcgacaatttctcctaaactgttcaattaagaagtaaaatgtcgtacaaaatagaaagtgatagttagcacaatatgtgaataactttgttacgttatctcttactttatctagatttaaaatttctaacaataaattaatatagtcactgttaaaaaaatctatagaacaacttcaatttttttttgtaagaaatcttttgtactaaataaagcttgaaaaaagagtaaccacaaattagagatatagaagatacacaacttctggaacattaatttagcagtcagtatatgctttaccaactactctggacttattccttcagatattattaaaatattatttactgtatttacaatgcatatatacaagttacacatagtacaaaatatatgtctataaatattgtgatcaaacatttttctttttttggtaacatctacatatcttttaaaacgttggttaagctgttttgattgacttctttcatacgattgtattccatactgaattctgccctaccttgtgttaaacttcttaaaattctgttatatgacaacatattctgtaatggaacctctgccttaattaccttagtatttgtattttgatatgtatccttcgaaatcatagacaactcactctttgggaagtatattgcatctgcataattcgaaaactctaacaaatctttcataatgtctcctgaattggaggaatcttcaatagacaatatgtttgcatttcttgcagatgtcaaatcttgagatactctaccaatatcactggcattaactgttaacgttaaattcataataggttctaatacattaaattgttctccaggtagaatctttatggcttcttgaattaaagatctaattatatgtaatatttctataggtttttctacatccaatggaactttccaatcatctttaactcttacaatacatccaaacaaggggagacaggccactttaccacctctttgtaattcaaccaatgcacttgatacaatagaattcacaatagattcaaaagttagaataggtttccaatcatttaaatccggatcaaaattcttatttttttccattagtatgaaattattatcattttttaaagggattgacaatccatttttattttgatctttactacgtgaaccaattatagtattatccaataatggctctattcttacagtaaaatggtatccttgtgactccagttgaggcgatgtgcttacccatggtgttgctgttttcaaagattccttatatgaaacggataattttcctaaatgaacctttgcacccataccattaattaatctatcactagcaatctctaaatgtaattcacccattccgcttaaaatagtttgacctgtctcgttatcttttgataactggagactaggatcttctgtaattaattgtttcagacaatattccatatgatccttgtttcctaatgtttgtggttcaacgaccacactaaatacaggtggtggaattgttattggatatacctgtaaacctaattcatttttagcctttaatacctttaggccatcttttttacttgaatgtgacaccaatgtatcgcctgtggcaattgcatcgcctattgaagatcctgtaagtacaccaatttctcctgcagataaataattaatttcttgtgttttatcagcattcattttaaccaattttccaattctaatcttttgaccattgctagaattatacacagcgcttccattccttagaacaccggaatagactctaacaaaatacatagttccacgaattggatcagttataattttaaatgctaatgccatgcacaaattattatcattattgattatcaaaccatttttcgaatcaacattaacaggaacaactttgtttaaataacttgtatcctttaaatctggtactctagcttccaatggggatggcagatagtctctaatagcatctagcaatggctgaaccccaatttttttaaaagaagagccacaaagaactggagataccttaagatttaaagtagaaagtcttatagacttgtttagtgattgtgacgataattttgaacaatctccatctaccatgtcgatatattccgatagaagatcttcatcaaactctgttagtgtttcaaccaaagattctctacacttaatcatatcatcaaaataaggcgaattagctttaattggaatcaccttgatgttatctctagttgtatcttcaatggaagaatcccactgaagaagtacttgattaactacatctataacaccgaccaaatctggttcattgaacccattttctgataaattaaacactgggaaattaattattataggtctagtatggagtttgattgcaatggatttaactgagttattaaaattggctcccattctatccattttattaataaaacaaatcttaggtaaaaaatggcttaacttccaaactttttcagtctgagattccacaccagcaacaccatccagaatagtaacacaaccatccaacactttcaatgttctcataacttcaaaacaaaaatctgcatgaccaggcgtatctattaaattaattgcacagttatccccccaagggaatgatatggctgcactttggatggtgatacctcttgatctttcctgtggtaaaaaatctgttgtggtatcacctgtgtctacatctcccattctattaatcttaccagaatagtaaagtagtctttctgtggtagtagtcttccctgcatcaatatgagccacaatcccgatattccttattttagagagtgcactgacgtatcttttctgttctatagactttctccatataggttgtttgtacaaagatgctttggaaacggatcccaatattctttctgtaaccgatcttgaaagcatatttaatgcacaaagagcatagtttttcgaacgttatatactcagttatttcaactattcctctcctctctttcctcttcttctccctctagtcatgtctccaagtattgttaattctttcgagtatgatggtttacatttcgatcttatttattgaaagaaaatgtcgttcatcagaagtggaaactcaaggaaatcaacaaaggatcacaatttttcttcggagttttcaaacaaaacacacaatctgaaatgagaaggaccaaagattaaatctgcagtactgtctctttaatctgtaatgaaaacacatgaatagtataaacaaatgcattttgaaggtgccaatcactgctgaatattaaaattcgagacgttataatatcagcttctataaaatgtcttcgtgaaaaaaaataaaaatttatagctcgcattattatatatacaatttgaatatattatgccttgaagttaatcacttgttaacaaccataatgcaatctgtactgttgattaacttcaggtgctagcatataatcctatgatgagttgattttccaacatttctagttcgataatgaatgtaatattcacattactctctgtatacacacgcttcttcgaagatatccaggatacataacctagtggctgtccattcaaggattgatattgtattaatctacaacgaaaaaatgttcaagaaataaatttaggacgaaactgttgatatttttatagtataataaaaattttattcaatatcagttggtatacttactaaacaagattttgaatgagtaaatatccttgaataaatgctaaatttacaatcaggtaaaataagagcattaaactagggcctgggatatacattatctacttccaaaaaaatctaaatatcttattattttcttactctcatatctattaactagtttcccttcctagcgttgatatcgttgttgtggttagaacaaacaattcatagccgtaaaataccctacgttctttgctatacactattacattctctcttgcaatgtatagtggtattgatgcttgttatttacaaatgatttctttattttttttttgttttttctacacctaactaaaaaaaaattgaaatgagggtaatttttatataccaatggtgataattttctttccttttttcctcttttttttttatttttttttttttttttcaattttttgaccctggaagctccaaataatttgatataaaaagagagatgctgttgaaaatcagcttctgttggaagttcttcccgcattcacttctaaatcaaggcttttcttttgatttttatttccgaagaccccatcatcagtagtggttaatactatctcaagataatattaattaccatttttgatagaaacctaaagatcaatgatttgagttcttatgttaaagggaggtggtgaaggattcgttctgattcgcctttctttaattagttaatactgggatttgaatttttgataccaaaattatacccatagctgaatgaactctgaccagctccaaacaagttgggcacagaattcatttcgtttccggtttcttagaacaatttctattgtgagggagttctctttgtcagaaataccatctaggtgtttcggaagggaagggtgcgtgttttcagagaataatgtaatgttatttgagagtttgaactcaacggtgccctctctcacgttagtacatcatcttatggtccttgttcttcatatgaatctattaggtaattaccattcctatacaaccaaaaaccggtagtcttgtacttcgaatcttgatagatgttgcaagtgttatctttcaaactctcttatatatttgtattcattgtgcgatttcgctattaacaagatacatatatatatagatacatgattatatatgtgcgcgtctaaaagcacctacgctttccacctatgtttttaaaatcccttttaaccgtaaagaaagggcatcccaacagtatatgtttgtttatgcaagctattttcacctaggtggactcattctgagaccttatcttttgttgaagatgcatttgttgtagtctgctttatattttcagcttttgcaccctcttctcgaagttcttgttgctttaattcccatttaagtctttcagcagctctgtagattttactttgcaagtaaaaactgccacctttatctttactattcacatcaaacaaataattgaacctcttattaatattatccaaactgaatgaatcgctattatttggctcgatatttaaaatcttacaactttcatccagtgttataccaccatattcttctttagcagtacgacgcctattagcttgagtagcactttgtttcacagactgagcagcagcctgtttatatgctgcagaaaaagctttcccaaaaacctgggcaccagtgataataacttgaacaatagccctgtgagccataatgataatatatttaattgtatgtttccttatctatttaactatttcgtttctttcctcttacaaatatagaggtgaaattctgttactttattaacactcctccatgatcgatagataatagtacaaagatccatcttcaacttcggcttatgctaacagtatttcaaactcagatcttcttttggttcactacttatttttttttttatcatttattgaactatttatttttctttttccttttttaatactatagaacttcaaggagggtaacttttaaacctaaaaataacgaaaaaatataaacaagtgagtacatagttaatccgagactttcatataaactatcaaaaaaaatgcacatattttgtcatgccatttcctatatactaatgctattcatttattttttttgctatgaatatatgtataaatttattattaattatttatcataattatcattggcaatcatgtatgcagcttgttaatggtctgtttattcgtttgtgcttttaaaatctgatgaaattcttctgcgtacttcttaatcttgagcaataaacatgtatttccatatttcttgaaatgacaggcacaaggtgacgattgccaaatagtatcaatgcagtgaatcaaccaatatttatccatatcacttaggttatcaaacatttgattaccatctataatttgacaaacaggatgtctcaaatcccattgccatttaattaacaactcttcatctttcttaatgtcccttgttgcaacaacaacaaagtgtataccagagtcatccttagaacttggtggagttctaatggtctttaattccacattaggttgacatgatcttctcaattcatttatcattattgcggaattgttacccttataaagtgctttagaatttcttgtatctatatatattggccaatgtggatggaagaacacttttggttgtgtggtccccaaaatacggtattggttaactggatctacgatgtaatttctctggaaatcaatctcaccaataagttcagtaatcatatcactcttatttatatcttttttagcaaagacacctttcattgtctgtatagagcccatatcctgcgaattttgaatagaattggagtatatgatatctttttcaaatggtaaatttaactgcttattcatttgaatgacccaatcatcattgttatgaccataaacgaacccttgtacatatttatccttataaatagactttagcactggaatagaagatgattgcaaattatcttttttggttccagaagatccattagataatagactctcaattgagtttgatttggtattaaatttttcaatgctttgtaacaatggtgacgatttttttacggtgttcttttgatgtgggttaggtggttctctttgacatgaatatggaaagctatcccgtatcttggtaagttgtgttgcaacatccaattccgtttgcgatgctgtatttttaaagtttgattcattagatacaagtccaccattggtattaacattaaacgtattactattgctattactattactcctgttattgttagtacagttgttattgctaatatttatattaatattattatttttagattttttctttttatcaataatttttttggaaactttgtaatcttttattttcaggccaggttgacacacattacaataaaacttgataggtaaaatctctaatttatttatcaatccataacatctcatatgttgccatctattacaatgatgacattgtattagaatttttttattatcattaatatcgataagatttccatttacgccacatttacatgtcagaatatttgtctgttttggaaggatatatgacttaggagttttattgttattcagggttatatgattctttgaatccacctttgatgcaacatgtcgttttttcttactaggaaatggattggtgacagcaacagttaaagcagcagcagctaccaaacccttccttgaatcgttattattattattactattggtgttgctagtgttagtaatattgttataataattattattagcagtattatgttttatactttctgatacatcagatgataatgtggttgaatttgcatttccattaagagaatttgatatattagaagaagtagaacagaaagagttagacccagttattgaatttgaatgtgagactcttctcttttgtagataggaattggagttgatatgagtgtattcttttattttaaaatgctgattattactgatgctattatttgaaggaatatcacattgtaaaagtgtaatggatgcgggaccaggagatattaatggattaaatggactagtttctaacacagaggaattcagatgtttttggatttgttccctaacttctaataattttaattgaatagaatcattagatggagtcatctttactattattattattattataacctatcaatattattgattaattatatacttattaactattttcgaacctccactcaaaataatacaaaaaaaaaaagaaaaaaagaccttcaatctattaagcaggaaatcagataaaataatccacaactgaacacggaagagaggtatagttggttgacaatgaagtatgatgaccacctcctagaaaatcgagttaaagttatatggatgtataaagtacaaatatatatgtatatatatagaagctcaaaagattgtaccactctttgagataatgattaagttcatttcatttgtatacgaagcaaaatagaagaagatcaatatgcacactcgcacattgaatagaagataagatacgtcaagaaacaacaaaacaatatacttatatttttttttgtctttgtgtttgtgtgtgtttgtgtctgtacgtgcgtgtattaaacccaaacccaagtgcaagcctaaacatctaacggttatgtttgatgggctctgttttgtgtctatattaagtttattacacgaaggggctgtagaaaatagcgagaaaacaaaataaaatggtgatttaatgctacgtcaacatcgaacaacttctgtattactaaggataaattcaagaggccagaccgcatctggttgggttctattcttttagatggagttaatggaaatttaatttttcggtaatttcgtatcgtataataacgataaaaataaaagaaaaaagaaaaaacaaacaaacaaacagacaagagatgaatttagacaataaaaaacaaaacaaagacaaacttttaaaaagaaagagatggtaaaaaaaaagacaacaaaagactgttttaatcccctcttccctctctgttttccttcagaaatttgcaatctcacctaaaaagttatccacaagatcattaaatacggtagtctttttcttttttattttaatttttcttatctcgagaaaaatcatttattcgattaaatagaaaaaaaaaaagttttccctaattagggtacaatgtatcggtgatgtctatctacaaggcttacctctagggcttagtttatattaccataggtattatatagaaatagctgataataaacgattttaaatactttctactttatttgatagacaaataatatattaatattaaatcagaaaaaaggggaggcgagagactgaaaaaataaatagatcaagaaaagataactcttccttgaatattttcagcaagctacagaagactagttctttaacaaaatcatacaataatgaacataattgaaaagaactcgttactttttttttttcttttttttaaagatgaactttgttatactttagatgtatttcaaccaagaaaatatcttttttaaaactctttataatattaatatcgcttctataaaaagttaatcgaaatattcaatagtcatgtataatgtagggttagttctgtcctaggggtagtgacacctttgatttttccattcgtctccatttcttactcagggtaattttgtcaaaacaagaaaaaaaagattctaacaagcgtatctctaaaaggaaatcatggcacaatttttagaggaggattgcaatttctaatcgcctttattttttttttctttttattttctatttttactttaaatacgaaagaacacaattattattattatttttttttttttttttgtgtgtgagaaaataaaaaagaaaaaagaatggagaaagacaaagaaaagacaaaatatcagaaaaaaatccattttttgtttcttaatggagtatgtaagtttcttaattcggttaagaaagtaaatcgttttatatcgtcgtttaaaaaagtatatttctacttttatatctacgttcctatcgttacttccaattataaactgcatatataatatatttattatcttctatgacttggctgcgatatgtatactcttcttttaactaggctcgtttctttcttatataaggaaaacaatataactaacagttatttatgtgtcttttatgctctacttcttcttttgtttttatttttttgtttttgtgtttaaacaactaacgagggaaaactaaaacgaaacagaaataaaatttgagaagaccaagcattttacaaagtcaaaaggggtgaataattttaatcattgttttacagctgacgcattatatcttatctgcctgctaatgtaacatcttggttttgtgctgttacattaggattcaaggatatcaagtagcgttatatattttaagaagaataaaaaaataaaaagaaataaacatataagaagcataaatctccactactaacagcaattattacacacagttactcgaagcattgaaaccatcaaatttatcgttaattttttaaaaaaaagaagataaatccacttaaataactccaactatttttatgatgaatattaagaatatagttatacaacttcgactgtaattattcgttagtaatgccaatactaatagcattattattgttattattattactattcaaaggaatttgaaatgttttttttctttcttctaggatacattctcatagaatatcactctgttcaaatattgactagatattgtgactcacttgacgaaagataaaaataatatctattttataaacatacgaattatttacatcttaaaaaaagagttttttctacgattttctactttctttgtaattgtgttgtatggatgtaactggattcgtagattcataatcatatcctacgatatatgatctacacatatatctgagtttctaataacgaggcaatttcaatactatatgtaaaagatatagattgaattctctcctcctaatgtttgtactttattgtcattttctaagaatcactcgtaaaaaaagaccttacatattttatttttacttttgtcggcatactacctcgattctaattaagctaatggtaattgaaactttagaatgactcgtaaggaaattatattaacgagaaaataaaaatgtatctgcaggaagaatgtatacaaaaatatattcaatgaatactattattatagaaacaaaagtgcagctaagttattactaatcttcttcgctgacaatcaaacttttataagacaaataattttcctaaaattttggtgccacattgtactttatatcaaagagtgggaaaaacaataaaatactctgtgaacaagaactaatagctatgatattacttttttcttattcttttagtgtagaagggtgtattcattcagtccaaacatataatactttcgtaaattatttgtaacaaaaaaaataagcaaaacaaagagatcgggaaaacagaatgaagccataaactcttttaaattgtccaaaactcgttggtgtttcttgcttcttcgttaattaacgatacagaaacaataaacatccggtctaattaagatcttcttcccaataacatattttaatagtaaattaaaaagaaaaagaaaaaaaatctttcccacagtttttttttcttggaaaatatgaaagaaacacatcattgagaaaccacgttaattcagaggaattgttatttatacataactggcatacgaacaaaacatcaatattggactaagaactagatgttatctaaattgtttgaaaggtaaaaattattttttgtgttatataggatctaaaatatatttccattgaagatactttgggtttggtcggggtttgtttcaattattatgtcgtttaaaaaataaaaaaaagaacattaacaatacaattttgatgatttatatttataaggaacgacacgctagctaacaatcacctaaaagctgaaaaaaatatatgccaaaaaaaaaaaaaagttatactcaagataaaaagtacattaaaaaaaaaattaacttcaatcaaataagcataagtttagataacaaagaaaaaatagagcctcatatatgatcggaagaaacaaaaatacaaggccaatggataagtaaattataaaccttgagatgattgatgatgcattaaactttatttgtatatcaatgttttcttagaaattattgttttcagttatttaatgatcaactggtaagtttcatttttttagccgtatctgtttgtgcacacctaagtcttctcttgttgtattcatatctaagtgtaaaaactcgaaggtagacaaaagtttctttttctccgtctctttctttttctttctttcttttttttttaacaagatatgattaatatttataagcacgaagttacttattctcctggctctaaattacctgtacacactttataaacacaatgattagctaaattggatagttattcatacctcttatttcattaatgctcgtaaaaaatataactcgcctatgtaaaattatatagctacaaaatgcttatatatacaataccacctttatccacattgaaaaggctctaaattatcatttcaaaatgtaatattgcctacaaattgacttcctcttgtctcctcatgaggtttactatgttcaatttctatattatctataatattgctactggaaagattaaaaaagggctcttctttatgattttcagcaaaatactttctagcagtaatattcatactagagtcaaacgaactatctagtaaattattatgtctatgttgaatttcattttgaatattttttgaaagaatataggaatttggatttgttttattgtagttatcataatcatttttattaatagtaacaacatttgcattaatcaaaccggtatacatggaccctgtattagttcttccattagaagtttcaaggttcatgggaaatgcatctgaaaagtccttcatctgttcttgctgtatcttaatgttgagattctctaactctggatcagcgtctttccctacggtaaaaaaatctccataagaagcatgattaaagcatttctttaaaattaatgagtcaccttcgtttgggacttccctaggtatagaatttttaaggtttaattcaatttctctggacaattcctttttaatttcctcctcctctgtatcgtagatctcatctctaataaagcaatttttgttaccatccttataaaattgatcactatcatatatctcatctatatcaatatccaaatcttcataagtatcattatttttaaccactgataattttgtactttcaagaaaagcatctgtcgaaggaaccattttctcaatagttgtatccaaaaggttattcacatcatttcttttatactccttcaaaaattcattaaccgttagtttttcttccttaggcttttctgatataagtttattagatgaattagttgaagcaaattgccagttaggatcccgtctttttggtgattgagtacacaagtagttcctaatttgggaactattctgcttcttatcttctaagtcttcgttttccacatttatcttcaaagttttacctctggacataaaagattttgaattcaaaccagcaaataacatggcctgttgcatattactgattccattagtctcatttgaagactctttctgaataatagtattttgaaaaaatttaaaattttgcaacacacatgcagaaactctttcatttggatcccactttaaacattgttcaataacttctgtcaagtctcttaattgtggattaggcaggattgctcgcatgctaatcccttctgaaaacggtaatgttaaatttagtttatttaataacaataatgattccttccaaaatcctccaaatggttctgaattaagctgagaaaattcaggcgacttgtagggtgttccaaggacttctaggattctccaaacttggtctagttcatcattaccaggaaataaaggcttaaaagtagtaagttcaaaagcaacacaaccaaaagcccacatatctaaaggtgtggaataaaaaccattccttagcaaaatttcaggtgatcgataccatctagttgaaacataaggcgtatatgaattacaattgaaaatatttctagctaaaccaaaatcggctaatttaatgacataattatccttataatcacctgttttcaagtactgtttatcaaaatacatagagcttggagtcacaagaatattctccggtttaatatctctgtgaaaaaaattgtaagaatgaatgtgttttatagcaactaacaattgtgccaggatagattttaaagaaggatatgaaaatactttattctttcgatgtttcatcatttgatacaaattttgttccatatattccattactatatgcaattgatactttctagtatcaataaatatttcaaatatctgtattaaatgcagattgggtgccattttcaaaataaactttatttctctaacttttttataatcatgtaatgtttttagtcttgttaccatagttttgattgcaaccaggttttgacaatgagtaattttattggcagggaaaagattgtcttggcacattaaagttgcaccagaattatcattattcagcagacgatttacattaaattgagatttagctaaagtcacagtcccaaaggacccatgacctaatgcccgaataaatatataccgaccttcaattggtttcaaaggaatagacctaggggggaaatccaaatctggaggaatgaaatcacctgtgttggattcttcatattcagaatatgatgtttccattctgatctaaaggaccagctttatactaatcacttttttaatattcgacttcgtttttgaatatctagtcaccctactgcctgaaatcagcttaaatcgataaataaagaaaaaaagaataagatttagccaaataaaagaagggtctaaaaaaatagtatacctgtggcagaaacgttaataatctatcatatcaacaattatttaagaaaaaaataacaagataagcacatactaataatctgtcaatacaaattaccaaccattaccatatcttatttaaaaaagtagcaaaatggcacaaatattttaatcaaattttgcatgaaaatgtagcaactttgcacaactctcattgtgatacaaaacgaattttgtgaaaggtgtctagatattgtttgtgaaacttcataaattagccgcgcacaaaaagtaaaataaaaaaagataagataaaaaaacatacaatcaaataaacacatacgccttacagatacgagagtatagagtattatccaactagataaaaagagatccttgtttgtgatgtattaattggcgatatttacctttgaaatattactaaaaaaaaacaaaacaaaagaagacttagatctctcctgtatgaccatcatcatacaaatcatatcttgaaagagacaactttttataaagacataccaaccaatacagatgtatgactaaaaataatctaaaaaacactaattaattacagtcgatatgcttgtatatattaaattgtgtataatgttgcggattgtgattatcttatatattggtgaacaatataaggcattaaacactctaaggtaatcaaagggtcattcttaatatttgtatagcaataaattcacagtaatttaatttctaacttaatgatattaaaagctatacgccaaatgataaatcacatctcaaagaaataagggtattaccgagcgatgattccttctacatgtaaacataagtttttctattactatatgtttccaaactattatgagacttattcaatcgtttcattatttgttaagtattagatatatgttcacctttccttattgatatactaatttatcagacaagatatgctctgtaacttatcacacctatcttaagactcattaatggaaacattccctttttatattattatccaattacacgtatgtatctataatccatatcaaaaaagaaaagaaagagaaaaaacaatcatttatcatcacaatgttatttacagatatcaatttataagtgcatgacattttatagtcattaagcttatatattttcccatcacatacactctcccaatacatgatctaactcatagccgtacagcaaatctgatacatttaaaaaaaaaaatttccgaaaccagctagaaaatttcaaaagtaacgtattaaaaaatttatatattaaaaaaattttttttaacaaaaaaaactagatgaaaaaagtgatgagtttatgagtgttagatagaaaaagctgtattttttggtacacttcttatagattgatattccaactaaaaatagcaagcaaccatgtcctctttaagtgcacagttagcacaagttgctgctaaaaatgccactgtcgccttagatagaaaaagaaggcagaaacttcattccacctctcttatttacaatccaaaaactgcatcaactcaagattatgaattcattttagataatgcatctaaagccttgaatgatttgattgaaattgaacctaaatttgctattttcaataaatccttattctctgaaacgtcgttatctattgacagaaacgttcaaactgccgaagaaaataaagagttagacaatgccgttaatatgtttttaatattagcttcttctaagtggcatcttgctccaactttacatgccactgaatggttggttcgtcgttttcaaattcatatcatgaatgctgaaacgcttttattatctactttgaactactaccaaactcctgttttcaatagaattttaaatattgtaaaattacctccattatttgcacctttatctaatttcattagaagtgaaaagtcggtgacaaatttgaccataattaagctattcaatgatatagactttttaaaactatatgttgattacctgagtaaatgtatcaagcaaaatttgacctatactaatcaactattatttacaacatgttgctttattaacttaattgcctttaactgcaatcatgaaagcaaattgaatttgttagttcctgttttactggaaatatctgccaaactcctaggttctacctctaccgattgtcaaatagcagctcatactattttagttgtatttgcaacagcattgccattgaaaaaaatcattatattagcagcaactgagactattttatctaatttaagttcagaagaagcaaaaaagtctgcattgacaactatatgtaaactttttcaaacattaaaaggacaaggaaatgtggaacagttaccaatcaagttatataaaattattgataagcatttctcatttgaagatttagttgattttttgaaagaaaatcctactctagctgctgataaatttgttacatgctatatcagagctattgctagatacgaccatagcaaattaacattaattgtcaaaattttgaaaaccataaaattagaaaagttcgaaatcaaatatttaattacagatttaattaacctatcagaaattttggaaagtaaaatccaattggctgaagtgtttgagtactttatttcagtcaatgagaaactagttttagactgtttgaaatttttaaatattacacctgaaatatttgaaattagattaacaacgtctttattttctaactttgagacaactattgaacaattagaaaatattgatgctgaaaaggtagttggaaaagcaagtgatattccattattcaaggagtttttagaaaagaattcttcttacatttacacagagaataaatctttactatgtgaaaatgatgatgtcttcatcaaattattaacactatttattgaagctgttggtagacaatattcaccaggccaatttttaaatactttttttactactttagaagcaagaattactttcttatctagagttattatttcaccatctacaccgtccactttaaagatcatttctttgaaccaaataagtaaataccttcataacattgacaaggattctaatgtatttacattagtgccatgcctatttgtggccttaaatgatttatctaaaaatgttagagcaaaagttagacagattttaatccaagtggcaaatcgaccaccttccaagcactacttcttatctaaaaaaatttatggggaaaatgttgcattgcagttattaaatccaaaagattcatcgtattggttaaaaaagttccttgatgattatgcagttgaaaattatgaaatagctgagctgttgatacccaaaaagaattcaaaggtttacactttattctgggcaaatcaagcattacacattcctattccgtatgcgaaatctgttattttacaaaatctagagaaatgtaatatttcgcaaagttcttacgccaaaatccttgagccatttatttcatcatacattgaatcaagagcaacatgggaacaaaggtgcaaactaaataaaacaagtttttttatatttgaaaagactgttgtaaacttaatttctgtcaaagagaagaaccaattcatgattgattttgcaataaacggtttgaaatcagattgtgaatcactatctgagacaattgccggaaggttgattacagtattcagttcttttaatttttcacaacaacttcaaattgttcaatcaattttagataatactgtagagatggaacctatctatgattcaattggattgttacaaagtcttccattatctgctgatattttcagtattattttatcacagaacagaataaattcagatgatgatattaagatcttaccaaaaagaagaagaagacattcttctacagtcaagtcagcctttcaaaaggaggaaatcactgttttggctgaaattcaccttcgtaagatcacaataattttggaaacattagacaaatcttctattaaggcaacttctgaattattgtcttctctatttgttttactgtctgatcttgaaactcttgatcaggatggtggtcttccagttttatatgcgcaagaaactttaacttcttgtttattgaatactattgagtcaatgaaaaagtctggtatttctgaatttaagaatattagagctgatatattggtatctgcaattcgtaattcatcatctcctcaactacaaaacaagttattaatggtagtgggtgctctagcttcgttgaattctgaaattatattgcactcaattatgcctatttttacgtttatgggggctcatagtattcgtcaagatgatgctttcacacttcaagtcgttcaaaacactatcagaactgttgtaccagcattgttaaagaataaaaaggcaaatacttcggatgaatcagatattctattaatgagttttgcaactgctctgcaacatgttccaaagcataggagggttgcattattttccacgttgttagaatccttgggttcctcaacttcaattggtccatttttatttctagttgcacaacaatattctaattgtctagataacttcaaattgggtgaagctaaaagtctaatagaattttgtaagtctttattagtgaattttatagtatccgaccagttgtctggtatacgtgatttgcttcaattaattaccaaactattaaaatccacaattgatgaaggttcaaagaatgacttaaactccgttgccttattctccaatcacatccttaataaacaattgagtgaattaataggctttgttcaacatactttttcttacataattaaaattattcaggatgatgatactgacttctttaatattaatggtacattcagtttaagagttcgtgctgctttacttgatacagcgtcagctaaggaaactgttagctcggttaaaagtaaatttactttaattttgaaactgatattaacttttattaacgacgcaaagtcgtacaattttgattcaaagacaaaccctgagatatcaaatgatcagaccactgatattaataatagtttgttcacgatgctaaacattgttttaaatatgcttccaataaatgagtttgttgaaagtactctaccattattaacagatagttcaaataaagatattaaataccaaatcagtttaataatgggcgataaatttgaaattgaacccattgaaactgttgatcctgctgttaaagttatcaagacattattaacaagaattatggaagaggtgggtactcctgatttggctcaagtaatgctgaatactttatcgacattaattagtagatatggttcaaacttaaatgagaaattggttaatagaagtatcaatttggctattgatctgctaaattctgaagtaaacgagattcttgtctcagcatttagtgttattaacaactgtattcaagtattgggtattaagtccattagttattacactaagattgttccagctgccattaagttattcaacaaaacaaaaatgtctgatgattctatgaaacaacaattacaagtagccattttattgttagtggcaaccttattaaaagttattccaagttttattacatcaaacttatcagatgtctttgacgttatattattcagtgatgaagtagacatcactactagactttctgtggtcgaacttgtagtcaaacatattgatctaacagatctcttaaagatgttatacaagacatggtctaacatttgtgttgtacataattctgttgctatatcattatttttgagctgtttagaaagcacagtggatgcaattgataagaaaattgctacatcacaatcaccaatcttttttaaattacttttgaagttgtttgaatacagatcggttagtgagtttgacaataatactattagtagaattgaggcaacagttcatcaaacagctaatacatatgttcttaaaatgaatgataaagtgtttaggccattatttgttataatggttaagtgggcatttgagggtgaaggtgttactaacaaaaagatgacagaaagtgagagattaatagcattctttaagttctttaataaattacaagaaaacttaagaggtattataacatcttattttacttacttattagaatatactactaaattattgataagatttgtcaacaaggatattgaagatattacgttacatcgtttactactaatatctttgacatcatccttcaaatatgataaagatgaatattggaaatctacatccagatttgaactaatatgtgaacctttagtcaatcaattaagcgttattgaaaactccattggaaaatttttagttaaagccataagttctcttacagctaataatagcggtgttgaagaacataatcaaatcatgaataaattactagtaactcatatgaaggctacttgttcatcaagagaaaaattatgggctgttagaagtgttaaactaatttattcaaaggttggtgagagctggttaatattattacctcaattagttccaactattgctgaattattggaagacgatgatgaagaagtggaatacgaagttaggacaggattagtcagggtagtagaaaatgtattaggtgaaccgtttgatagatatttagattaagaaggtaataatatttaaataaaatgtcatttactactaaaattaaattctaattcatctgcttgtctgatacttaaaaacatagaaataagtaaataatacaagcatttgttactttattaagcgtgtataataataataaataaaatctaataggtatgtattcaataaatgatctcaactatcacatattaggttggcatatgcttagttgattggtgattattccatttcgcctctctctttcttcctcatttcttgttctttgtggcattaaattgtaacctgaacgtgaaaggatactttgaagagtcctccaataagaaaattgacatcccttcatgagaacaacttttatcaaggattcgagttacttcagttatatggaacactttcttaaaatcggatgaatatatctagcaagtatttttatcaggagttctttatctttagctcattataaagactttttttataatcccatatatatacatatgactatatgatttattttaacctaatataggtttcacaatagtttcaaaatagggtcttttttatcctagaataaataaggaataccaacaaattggcaagttaatcaagtaagacatttaatccaacaacttgaaaccatctcccgccagttcacttttatcttcaaatatatatatatatatatatattatttctcatatcttctaatcctatcgttattattatgggggaggttttgatttaactgccatgacacatcagctaaagttgataccagctctataaaacagaaatgctgatttctttaggtgtgatgggatcttcgacgaaatctgtacagatgcttgtttaaagaggttcgcgtcagcaaaactcacaaggcgtgaaaaacaaaaaaaaaatttatgacagatttgcaaagactgagatgagctccaaaatttaaacattatagaaaaatgcaagaaactgtcgaccacaaagaggaaacaagaaagagtatctgaacctattaaatggagttgcaattttgtttttcttcaaattaaattggtaacacaagaagtttatattttttcatcagaaaacacccctattatatactcatttatatcattattttgttcaagttgatttgttaaaagtagttgtattgattccttattgaatagggtaatttttttttctttttatttatttcccacattatttctgttttgttaatatagtcgtagaagcaggatattctaagtactatatgaattcaatactagatatattgtgacttattaataaattaataaaaatgggccaggaacaaaataacgtatccataaataaaaaagaaaatcctattatagatattgttgataaaaatcctacaagtgaacctgatacaaaaacttcatccactataagtgaaataaatagtaataacaaaggtgacattgaaaaaaaagaaaataaagaagaaaagataagtaataattcagaagtacccacgtccccatcttctacaacccctaatgggaaaatagtatttaggaatactggtcccaatggtttagttagtgttgtcaatgtaccagtttgtaaaaactgcttaacttctaccacacctctttggagacgtgatgaaaatggtgctgtcctatgtaatgcatgtgggttgtttttaaaacttcatggaagaccaagacctatcagtctaaagacaaatattataaaatctaggaataggaaaaataattatcatggcgaaactaacaataataaccataatacaacagattctaataaaaacaaaaaagaaaatacatcttcatctgataaaaaaagaaaaagttcttcccaaagtactactactaataataataccccaaatcaatcaaataggatagataaaaataccccttgccagaactcaaattctaatggaataaaaccaagtcagaatagtaataaaaacaacaataatatacaaaattctaacaatactataagcagtcctgtacaagaaaatatagacagcaaagatttaaattataaccaatcctctctcccctgcaatgttccaaatatacctgtcgtcgactctctcaggatcggaaataatacaactccacattcaggtattattaatgtttcatctcaactacctggtctatcaagtatattaacaaaaattgattctaggatcattacaactgaaaataatcttcatcatgaaacatgtattactgataataaaaacaataacggtaataataatattattaaaattgagaatatagaaaaaaatatccacagtatatctcccccaatactgaataacgaagcaaagcctttgacgaactcctttgtgtacaatgaaaatatacttttagggacaaaccaatctcaaaacattacgaatcaacagtctattataaataatatggtacctatcactactcacaattcgtctgcaataaatacaccattacaaaatccacagtatatagcccaaaatgttccttttgaacctttgcatagaaaaattcagtttaattccttaactaagaatttcgttgataaacttcctggtggtgaccacattattaataatattggacaacaaccttctgaatcttcgggttcatcagaggtaaaatcagaccattgcccacaaattgcatcaccacaactcctcctacaaaaatattctgcatcaattccgactatgtcaaaaatgttactgtcacctgaagtcacttgtcccacaaataataataaaaaaaataagaaaagaaaaatatctgtaggacataagactaatgaacattcattagaggaaagactacaatatgaagaggaaattatacgattaaaaacaagaattattgaactagaatcagttactgatttatatcggagccacatttttaagctaaatgaaaaatgctatcaatatgaacagcagttagaaaagttaaataaataatctataatcttacaacactcctaaaatccaccttttgatatatgtttatttatctagtagatattaacagacgtttttacattatgtaataaatagtatcttgtaataatgattaactttttaattagtaacaatcactttcttaatttataaagaagtataaagttcccatgtatttacatgtaagcattattattaataggaataatatcaacatcttaatttagtatataaatttttatatgcatgtacgatctagaatattattatgaatagaaactttttaattttttttttttgattttaactttatctttattagtatggatatattataaatatgttaaaatcaactaattgcttgatcattaaattgcccaagcgtgtatgctaccattggaaagactcccaagcaaataattatcattatactgaataaaattcacattcgcattcaatgaatccatattgccacaatcccaatgtttagacttaatgcgatcaaatatatggatttgtgatgaaccatctgatactgcaatatttttcgagtcaaaatctaaagataaaataggtgacgaatattcaaatagttgaactgccgatccaattcttaaatcccaaactcgaactgttttatctaaggaacctgtcactatattttgcaaatcaaatttcaaacaggaaatacagtctgaatggcctattaatgatcttacaatttccccacttcttaaatcccaaagtcttactatcccatcactggtacctgttgctaatgcaacatcataactttgtaagccaccaatcttaggtacctcgttattgttcacagttcgaatatttccaggataattacttacgctctttggcgattggctaaatagattgatagaatcattagatattaaatctaaaattcttatacatttacctgaatgtaaatcccattgtcttatagtagaatcctgagatccacttactagataatgagaattaatacttacatttgttacggaatccatatgctcatcaaaactgtagacacaaaggtttgtatttggttctgaatattcattaaacgtatgaacacttttattcaaatcccacatttttatggtagaatctttacttccagtaactaacatattataagatttatctaattccatacaataaactgtgtcatggtgaccttttagttcacctatttgaatatcttttgatagatcccatattttaatttcaggattatcgttaggagatgaaaatagatgaccaaatggtaaatcaaattgaaatgaggaaattggtgaattatggatattcacaaacgatgatatttcactaccagagtcgaaatattgttgtaatgtgggtaatattttataatgtattttgtttttctcctgaaagaatttaatcaaattatctgatgagtggatatcatcgtactctaaaaattctgttacggtaatatccttattggtactgttatgaagttcaaccgatgataaggttgcgttgcttgtatcgttactaaatgtagaatttctattatcagagacagtagtggatgaggtaactgatgaattataatccattagggtgtctaaagtggtatcattatgcgatgtaccattgcccttctctaaagaaatttggtcattgatatcatgtaaagtagccatacgatttttaattaacgataagtcattttcaatattaatttccttttcctccaaactggcaatattattaaataataaatttcttctaaatttcagagtattaatcctttgatcgatatccctaatttctgatatggtaatatttttttgaatctcatatttagttaattgatttttcatctttaattcgaggtcttttaaaaaagtagaagattctgatttgtcgataatatctgtttgagaattacaattgtcatatgagtggccattatcgctcaataattttctatcatggatatcactgtctttctgattagaaagggataaagtttgaaatccttggtaaagagacggtagaagaatatcgtttgacatctgctgagtatgatttccaacggcaacaacttgtttattttttgaagcagtagtggcagtagtagcaatagtagtttttccatcataatcaagatcctttaataagtagtcattaatataagataataattggaaagtttttctttcatcgatcagactatttttaaaatattggttacttgattgagttatatctcgtggattcacagaggcaatatttttaacaatgttaacattatttgggtgaaactttttctcatttgattgttttaaagtggaagtcatgactttattataggggccgtctggtgataatattgtgctatgtaaatctgaagagttggccaatgcatgtgctgtcaatgttatagttttgccaatgttagaaagtgaacttattgtatttgctttgtggatgcggttatcgttagaattaaatgtaattttataccctccatcattttgagtgggcataatgtaatatagagaattaatcaagtattcagtatagttagtgttgtttaatcagtgaaaaaaataaaaaaaaattgttatattgaaaggtcaaataaacttcatgcacagaaacaactaaggaaaaggaatagatgatttagaagtcaataaatgaattaaaaaataaaagaaaaaaacaaaaaaacaaaagaagaagagagagagaggagggaagagagagaataactgtaattaattgaatacggcaatagctcgataatctattatctgtctttaatgttattaatacgtatcgaactcttgctttatttcttttcttcctctcaattactaagacctattagtgtaaattggattcttgtaaagacagttaaaattcaaaaatattaatggttggttaaaaagaagcaactatgaattacaataaacagtacaaaagctattccaaataatcaaccaattgttagatcagtctgtgcatgcatttttcttcttgtaatattaaaatagaaggatgacagagttgaagcttccccttctcctttaaaatcagtatactttaatttctttgttgtttctctttttctaatttccattctcctttttcttttcctttttttttttcccatttatcggctattgcttatataataacgtgtcatgcagaataatatggacactgtataaagaattagacatacagtaagtatttgggaagaaacaaagagagaataccatatacacaagcacgcacatacacatttgtgtgtacaattatgaatgttgttatatatatatatatatatatgttctagactcaatagttatcctttttggttttagtgaatatatgacttgttatgcctactgggtgtaagtgagttgttaaatttatgatatattcgaaacacacttacttatatgtcttattatatatatatatatatatatatatatgctaatacttcccaattaattttaccatgaactgtatattgacaaaaaagactaacaaaagatcgattatttttttttgtactttcagcattacatgttattttatcaatcttttttttttgtttgctttgttttcatttcataaatccaccttttgcttttttgaatccatggtaatttctaccgtatcttctaaatcatgtttattagatagtgtagaagactcatctgtatcttttattttttccttttggtccttgtttgtttcgtcatccttactttcttcttcctcttcaacttctaaatcctcttcagcttcctcttcagcatcatcatcatcttcttcttcttcttctgcctctaaatcaatttcaccattttcatcttcctctacatcgtcgtcatcatcatctacttcttcctcttcttccacctcctcttcctcagcttcttcttcttcttcttccccttcttcctcttcctcctcttcctcctcttcctcctcttcttcctctacttcatcatcaacttctggttgttcaggtggatataaatcactctcattttcgttatcccaaacaatattgaatctagtaactcttggtttctctgctaaaatatttctaacaatatgatctacttgaactttaacgggtggattttctctcaattcctctgaatcatactcattatttacataatacccgactcgaacaaactctttcccatcgtatgaacaacttaacaaaataacggtcacagagatcaattcactggcgggaatcaactctgcacttggtggatcagcagagaatatgaacttgttgactcctacaggtacgggcccaactaagatggaatctaattcttggtcatgttccaatgaacgagaagacccgacataggtcaatttccattctaaatccttttgtaatggctctaaacattcgaaggtgatttcgaattcgtaagggtcggtgaattttgcagggttatttagtactttgatacctaatagagatacaatagacatggtatagataaagtgttgtgggggcgtatatatgtgtatatgtgtatactgttacctgttgcttttttttttttctcttttttatgtaataaatctttgaacttcttgtgtccttaccctctgttgtttaattgaattaattaaaaaggttggtaagttattctgttctttaagatgatataccaagtaagttatttgaacagacgagaataaagaaacatttcaggaagaaagaaaaaaaagggaagaagtttttgagtgccaattatctttacttactaaaaggtcaagacattgccattaatattaacgttaataatattaataatattaataatactaacattattattacgatcattagtagtagtagtggtactattgatggtggtaattgttggacaaaagatggaaatagtatatctgattattggaattgaagctgacttgtagacagaaaataagaaaataataaaaaaaaaaaaaaatagtgggaaaatcttcatacaacaaaaatctggcaaacgcgtgaagttacaaagaaaaaaaattggggcaaggcaaaaaacaaaaaaaaaaaaaaaaaaaaaaagaattaaaattagaattagtaacgcgtcagtcacatgatcacgtacatccgtacctctccaaattcaatagtcttaaaaaaagaaaaaaagaaaagaaaatgaagaaaatagagcaaacgttctggacccactgctttcctgttcgagcagtcaaattccagatctgaacaaagttaattacatttccttttcgggaaggtaggcggctaactctttcaagggaatttccgagattacaatagagaggagacctcccttctcccctttttccttttatttttcttttgtttgtttttttgtgatttccttacaataatagtattaagacaggctcgaacactttgccctaatccaacgtgtattttaggtgttgggtgaaatgtgcatggcaaaaaacttcttgtgaatttcctctcttgtattgggcggctaaaattctggtctagaactctttttttttttctttctctgccgctgaggtctttattccaccgcctttatcttgttttatttttcttgtttctttttcagtgaacgaagaatatagaattattaccatttattgtggttgttgttgttgttctattctctggctgttaaagaagttgcaagttgttatttatgcgtgtttttgccactttaactattttttgggccaatgttatggccaacaacagttaacaaacaataataataataataataataataataataaaagaaaaaagtaacaataaataacattcttcaagctaaagaatatctctttccccaccccattcaaagatgattcccgtaatagtatgtaataaatactacaacatacctatatatatatagagagagagaaagagagaaagaaagagatgtgtttgggaatgtatgatactatgtttcttggatagagatttcattttgttaatatttgtcttatacttatttactatacaactcttcaattcatacaaattcgcaagtatctaaaaaccaattgtcggtctcgaatagtatactaatccaaatttactatctattacattcatttatcatttgatatcacgtttgtctgcgtgctttttttttccctttgagttgaattactattgccaaatcttatactatccactctttttattttatcaagtttatcctttcctttggttttcattcaataaactaactttgaatacattcattaagaattcttttctttcttttttgctttctttttattattgacacttatccttttttccattcctttttttttttagttttttgtttcattttgtatttaattatgaagttctctcaacttttatcacatttcacctttatgtcaactgcattggctgtccccaatgaaatatcttctaagcatcatgatcaacatcctaacgagaaacgtggtgttgtagtagtcacagaatacgttgatcaagacggtaaagttgtgatccctcctgaaagtatcgtgtcagcaactacttctgccgctaccattaccaatactgacacaaataaacagactacgactacattatcccctgatggggcaactcccacttccacaacaggttcatccacaactaataatgcagctaatggtatcttcaaagatgggatttacaaatgttctgaatttccatcgttcgtatctggtgttataccagtggattggatcggtctaggtggttggtcatctattcaagattcaaacggccaaacagttacaagttgtgaagacggcatgtattgttcttatgcatgtgatgctgggcaagttaagacccaatggcctgaggaccaaccagataatggttcctctctaggtgggctgtattgtaaaaacggttatttgtacagaactaatacaaacttcgatcacctatgtgaggatactaacagccaagtcactgtgataaataatgtggatattggagaggtcgttttgtgtaggactgattatccaggctcggaaaacatggatatcccaactgtggttggtactggtcaatcacaaccactagctgtgatcgatcaagacacctattataagtggagtggaaaacacacttctgcacaatattatgtaaacaacgctggtgtctcaaaggaagatggctgtatctggggggaccctcaatctggagtcggtaattgggctcctttagtgataggtgcaggcaaggctaatggtctaacatatatatccttgattccaaatccaaatactgataaaggcgccaatttcaatattaaattcaaaggggatgatttgaacggcagcgatagttgctcgtatattgatggtaaattgtcttccaccgacggttgtactgtatctgttttatctggttctcttgaaatcatattttactgatttcataataaatttaaaaaaaaaaaaaatcaaaataaaaattcttttttttttttttgtttttttttgcataaattatagttcgtttcttgttattaccacccataattttttttttctttatactttcgctatataccttatatttctagatttgtctttgaattgatacccacttatacatcacacataaatgtattatttgtgttttccgtttttttatgtatatctatactttcctgtattaatattgtatctatattatatgattctacaaaatttacttctataactatatatatatgtatatatatattgcgtgttgacttatacttttctaataataagataggcgaaacttccaatccttatttctttgaattttgtgattgtttagatttgatatggaattgtacaccccataattctttcttgataccaaacaatccaccaagaatcctgttggaacgtaatctttgtctagagaaacatttgaatccctttgacaacaaagtcttctgtagatcatgttctatagattcaacctcaataatcaatttacaagaggatttcttaccgttattgatcttttctgttctgatcattgcccaatcaatcaaatcgcctaaaatccccgacttaatatatacttttctacaacctaaagtgcttatcgtgacacagattgatgtgtcactggacaacacgtgggattcactcacagaaattaatgcaattggagtatttctatagacgatgatgtttgtgttttgcaaaactgtttcatctggaattttttgttgagccaattgattcaattcgacattaaataatggtaacccattggacttaacgattttatctacctctgctttatagacagtttccactaaacgagataataatgtgaaaatcaaagaaattaacatggtagaactaatcaacatggtgaaaaaatgggccttgtttagaaggaaaaggtgatataaccattgtgtaacagataaaaaaccatgagggtagaccaatctaggtatcatgatgatcaaaacaatcaaggtaatgaaacttagaacaaagggatgcaataataaatatttgttagccagggattgtctctgtttaatgaaatcaacagagagatttaatgcagctgtggcatattcgggggttaatgtagtttgaaaaatcgttggtggagaatctacatctaatggtttatccaaagctgcatcgacctgtttaatccttggaattttcacctgattttgtactctagccatgattggttgtttttattttgtgtaatcttctctcttatttgtatatgttgttgtaaattggagaagggttataaatagagaattgaacagtgtcaataaaggtatttatgattataaaatagaatagaataaaaaaagtggaaaaggaagaatcactctgtatttgtaaatctagtttatttttaattattttattttccaatcccgatacattgagcaaaaaccgaggaaatgaaagattgaataaatgaagatgaaaaataaataaacaaaaacaaaaaataaaacaaaaacaaacactcaatagtaatgtatttgaaaaacgaagtttatcaactgcttatatctctaagataaaaaggaaaaaaaaaaaagaaaaaggcattttgattcatcctactacaacattattacagaaactgacatggttccaaggacgatatgccccaaatctttgtcttaatgattacatttacctttggataagggaataatgtactttgttctttgaaatttatagaacataagaaaataatatatatatatattaattaaatataatatactactccactataaacaagaaatataattttttcttgggttaacttgacaaagttcatttcttgaagtacgatgatactttttgcaagtatcttcccaatacccaccgtctcaatcctgtattctttacatatatatatataggacatcagaatgccattttttactcaatacaaaattagacagctgaactatgctacacgattgcaagaaacgaacttaccttttgtttatcttttcttttgggcctatataaagtcatggtacaagatttaaatataaggataaatagacatatccctatctttacatacggttggatcattagtcgaactatgtctatgcaacagttctattctccaactagacgtttcacttcacattgtagaaaaaaaaattaataaatttacagatcgttcctatatttcattttgtatgtatgactcttcgtgtagttttttcgtctttattgttttttttttatttttttttcttattgtggttttttatttttctttttgttgttttttaaatcccctcacagttttctttcccgttttatttccttttgtggttacttgaaaaaaattatcaatcagattaataaataaataaataaataaataaataaagaaacaaatatacaagcaaaaaaagaaaagtgtttgtcttttttatttttttttgtttcatttctctcccgtaacgttttctttttgtttctcggttcatctgttttttgttatcgcaatcgttatcgtggtcatcattatcatcattatcatagtattaccatcacgaacccgggctttcatgactcttacttttcaatcttccttcgattgttaaaaatcaccagtcttgctattcccacgcttttcgaaaagtgcttttcactgaacttaaaattcattttgtcttatttatatatgcaataaatgaatgattgtgaatggaaatgcgtgcgatgaacgcgttgcgacaatattttttgtagatataatagtgaaaagtaatcaaggtgtcagataattaatgtcatctctctctctttctccctctctctctatatatatatacgtatacatagttgcataattaagaaaagtttgaagaaattataatcgacaacgaacatcctatttttttttctttttgtttttatatctttttttttccaccaatttgtgcatgattttccaataactatctaattcgttactttaatagtactgtcttatatattaaattatcttctttaacattcattgcattatactcaactttttctttctttctttctttctttttattattactattattattataatcttttttttcctgattcttttttgttttcagttagtagtcgtattttaacttccgacagaatttaagttcctctttattcaatcacagtttattattgaaaaacataacttatttacatactttactattgttgtcagttaggttttatattatactaaaataagttgtaatttcagtagtcaaataactatgaccaaatcaagtcctttcattactccagaaaacttagatacgtttgaaacatcaacatcagatttggtcaataataaatctaatgctactccatcaagaataattaaagatattttagctggtacatcgggtggtatcgctcaagttctggtgggtcagccgtttgatactacaaaagttcgtctacaaacatccaaatctggtactacattacttgatgtggtccgttctcttataaaaaatgaggggcctctagcattttataaaggtactttgactccattggttggtgttggtatttgtgtatctgtgcagtttggtgtcaacgaggctatgaaaagattctttcatcatagaaatcatgggttaccgatcactctgccacaatactatctctgtggtatgaccggtggtcttgttaattcatttctttcgtctcctattgaacacgttagaatcagattgcaaacacagaaaagcaatggtctagacagagagtttaaaggtcctttagattgtatcagcaagttgataaaacaacgtagtttaatgagaggactacctgtgatgatgctcagggcaggccatgggataggttgttattttcttgtatacgaagcattgattcaacatgaaatgaaaaagggtatagcgagagcagaattgccagcatggaaactttgtacctttggtggaattgcaggtacagtgttatggataagtatttacccattggacgttattaaatctgtgatacagactgatagattgcataaccctgtattcaagaattctatgattaaggttgctaaaaatttatatgctaaagaaggtctcagtgcattttttaaagggtttgtaccaactttattaagagcttcgccagctaatgctgccacttttgttacattcgaattcgctttaagaatgatgggataaacactttgaaagaattcttttttttttttctttcctatttaatagtcggtttattttatttctcgtcttttatatatagatgcatttttgtattttttttatttttttttttggtgaaattttgatagagaaatttttactacttatgtagatagataaaaatatgaaaaaaaaaaattatcatggttgtatgtaaaaggtttgatttatgttttttttattaatggatgggtcttgatctttttttcttcttcactttataatgtttattatgaagaataagattagaggtaatgactaaagatagtccgaagtttaaatctatatttaatggcagtttttatttttaaaaaaaaaggcttttcaaactaatcataatgctagaaataaaaaaaaaaagaagaaaaaagaaaaaaaaggggagaagctatacaaactattattatagaagtctcttgcttctaattaaacacaaagaaaaatatatactaaacatatcatttcttgttaaaaaatattgaaatatgattagagttatgttcgataatgtaaattcaccgtactaagtgattaaaaggtatgaaaatttatattaaagaaaactcgaagataaaatgagtatactgtataatattgtatcttgtatattatttatgtaaagagaaaaagaccaagcaatgaaataacagtttatggtacgactaatttcctactataaatagttgagaacttagaataccatcaatatcctattgtaagttatattattttatcatattaattcgaaatgaacagtaatagaatttgtgattccaagaccttatttcaacaaaaaagaaagagtatatatattactcgtacactcctttatgataattttatttagaagcagagaaaagcaacaagataattagaaaaagggtacaaaagaatatactcagcagattagtaaaatcacctatagttaataatgggtgcttctataataatttgcaaattttattcttttgattgtaagcatatatcacactatgttttttctttatggatagatcctttaaatagaaggataaatataatatccatttattattaaaacaatttttacactttattgttatatgattagttattttttagtgataacacaaccatatagaaggccaacaaaagtggctattgttagcctatagtcatgatgacgataattgtttaataaaaaatacattttgtgtttcatagtttcgtccattacactatatcacttaagacacccttattgactcagtccaaaaatgtaaaaatgaacggaacaaagaaacaaagaaaaaaaagaaacttttctataaaattcgaagaatctgtagtgccattagaaaagtccgagcaatttttgaggacattaaaataactctattttcaaaacttgctataacctttttcttttttacttctattttttgagggtttggtaaagataaagaaaatatttttgagcaatattttagggttaaatgtaaaagctttaaggaaaacgaatatagatgtatctgattttcactatataatataactgattacaagactttctaaaaaactagctagctacttataatattaaaaattttattacatgtctaaatagaaaaactatcacttgaataaatatacttattctatcaatagcttattgtatattcttggcataacgaacagtattatactctcttagatacacacatagaaaaagaaaaaaaagtgttttagggttttaaaataatagtcctgaaatttcggaaattaaaaattctaacagtataggttttttaaaaaattccacaatctttctctacataattaattagaaaatccaagtaaaaccgtggtaccgttttcttgatttcttttttttttcacttgcgcttcggggaattagaaaatttaaacaataagttatttgctcaaaaacagatatttactctatcataaaagaaaacaatacaaaccccacaccaaatcttcacagattaagagatctttccacttcttagttattaatgtcttcattaaattaagaaacaattaacaattcggaaatttaatcttacaaatcagggatgagactaattatgtaatatcaaagtatacatggtgacttattgaacattgtaaactactgataagtaaaattatcaacatattgtgaaagtttccatgaatcaaaatgatataaataccttaatgttgattgaactattcaaaagtcttaattgcatctttgtttatattcatactctacataaaaaaaaacaagatcaagaaacccaataatataaagaatatcattcatttttgtactataaactagattagaaaaacctaaaaataaacgacaaaaaaaatgccatttgtaaaagactttaccccagttgctttgaaggacactacattatttaagccaatccaaattggtgatattgaattgaaacaccgtgctgttatgcctccattaaccagaatgagagcacatcacccaggtaacattccaaacagaaattgggctgctgaatattatggccaaagatctagatatccaggcaccttacttatcactgaaggtacattcatttccccacaggcaggtgggtatgataacgcaccaggtatatggtcccaggaacaagttgacgaatgggctaaaatttttaaaagagtccatgacaacaagtcatttatctttgttcaaatatggactttaggtagacaatcctttgctgacactctagcaagagacggtttacgttatgattctgcttctgatgatatatatatggatgaagaacaaaaggaaagagctttgaaagctaataacccacaacatggtattaccaaggatgaaatcaaacaatatatcaaagaatatgtcaaagctgctaaaaatgctattgctgctggtgcagatggtgtcgaaatccattctgctaacgggttcctattaaaccaattcttagatccaatctctaacaaacgaactgatgaatatggtggttcaattgaaaacagatctcgtttcgtattagaagttgttgatgctgttgttgaagctgttggccacaagaaagtcggtatcagattctctccatacggtcttcatggtactatgtctggtggtgccgaaccattaattgttgcccaatatgcccatgttattggcgaattggaaaaaagagctagacaaggtaaaagattagcttatatccatgtggtcgaaccacgtgtcactgatccattcttagtcgagggtgaaggtgaatacgaccaaggtacaaatgactttgtttactctatttggaaaggtccagttattagagctggtaatttagctttgcacccagaagtcgttaaggaactagttaaagatgacagaactttggtcgcttatggtagattctggattgccaaccccgatctcgttgaaagattagaaaagggtttaccgttaaacaaatacaatagagacaccttctatgctatgactgataagggatacatagattacccaacttatgaagaagctgttaagttaggctgggacaaacaataaattgtatttgcttgttagttcattagtttttttgatttatttataattcattatagcaaagaatctagtttgtagatcactaatatacagtcatatatatttataaaaataaattcataatatcattcattttaaaacagagattttctatagttactgtttttgtgttaaattttataaattaagaatggtttacttttgttaattctgaacacttgtcaaactttttgtgccataactaaatcgtaatatggctatatttgaacgctggcttgagtttgaagaaagatatatccttgactgacaatgaatttaggttgctcccaatatatcaattgtaaacttttatactggcactgtaacatatatttctataattctatatatataattctatatttatatgtgcgtaaatgaatttacatactttatgtctaaacaaattcatgagatgaactacctggtatttttgcgtaaggtaccaattccagttgttgaaatctttcggcatctttgtgatagtagaaaccttgaatgttccccgtaaattgatcgtgtacaatataataatagccatcaaatgatgcaccttcgatagtatccatgtcaggattctcaattaaaaatttctctttccatctcatgaaaatatatctttggtttaggtaatctttaacatggttcgatatcatattaatgtcgattgatttattattaaattgatcaatatcaaacatttccttaaatgctggaaaattcaaccaatgttcaaaatcgttgaaatcaaaagaggttaaatcaagatgataatcccatgaagatgagaagaacccgaaattattatcagtgacagcaaatgattcaaaaaatgtagaaatttcatcttggtaatttgtcaacccttttattgatagaaaccctgtcatatgtggcgaagatatattggttttatagttgtgttggacaggaaaattaactgtttttaaagtcactgtaacttgatatctcttatatcctgatatttgatatccagtaaatgtcattgaaggtttcaaaaaatttgtctgttttgaatatttaataggagggtcaattgaaagaatatcaatattggtagtatcattaaaaagaatagtatgtgaatatgaagaggtatcgttaaatatatattttttataagtaggaagagtacccaatttatcatctgtggaaacaagtgtagatagggaatcagttgaattatattttgaaagtattccaagtgacattgaagagagcttactttggcattcatattctttaagtatttgtgctaggtataactttctttcgttatcactgttcgatattccattacaaaaatattggttttcattttttgtttgattatgtttattggattgtaatgtcaaaagatcatcagatgaaggagtagatattaagtgttctcttttttgtctttttagaagatgaacatctttatgatcttcatgatcatttactttagtagttttgtgtcttattgatgttttttggtcaatcattaatgcagatataatataattttgtaatttttttcttctaataataatattaacgcataaagaagcaaaatgatacgttcaaagagatcaaatggaataatagggtttattgtttatgttgaaaagaacacacaaaagaaaaactttgtttgtattgagtatatgtatcgttagtgttgcaaaagatcaaaacagtatgctcaatataaaatcatattgaaaatgtgggggaaactaagcagctaaataggacataaataccggctatacactggattattgaatctttaaatataaataacaaatgcttgaagacagagtcgacgagaaaatcattgcaaattttaaatagtattcttgagttttactattaagaaagactttaaaactgtattgtttagggatatgaataaaataatttgagattaacaaaataaaaataaaaaaaaaaaaaagaaatcacgagaaaaataaaatgcattttttttaaaaaagaagaaaagaagaaaagaaattaaaaaataagggctgattggaaaattatccttttgaaatccccataaataaataaagaataaaggtttataaaaaaatggaatactatagaggaaaactttcctttatcactaattatagaaactctttttcctaaataaccaggggttgttatgaacgtgaactgtacaagtatccaattccaaacattggtaagttagggttcaggtaaaaaaagaaacaaaacaatcaaaatgcaaaagaaaaaaaagaaacttcataggcactctttaaaggcaatttattggttcaagatcttatcactgattattctttaaaaggacaggaaaacaattgtagataagatatttgtctgagatatttactgcaataatattctcttgacaaccctatatgaggagcaaattgaatattacatctaaatgctatttttgtgtggcacccttgctttgcttatattatgataccagaatcgctttttattgagtaaagtttagcaattaataaaataagctatataatgaaacacttgcaggtaactttgtgatatgaaatagattaaactcaaattgaatagttaattatttgccaacagtctgaggaaactcattgaagtgtttgtgcactctcttttccattgagttgattctatgtatttctccaccaaaacttttttgatcacttttctctagtgaatctaattcataatacatatcagtcctattaacccattccataagttcagtaaaattatagtcatgtgtatttaataataaattcttttaatttatctggaaaaagcaaagattaggaggtggcatagagaaaagtcgtaaactagattttttttataggaatcatctttgtttcaaggtctgtgagggtgtggacgaggtctttttcgtatactacatgacagttatatctaataaacatagataattaagttgaaaggcctggtatgccagcatattttactatactttgtcctctttgaattagaaacgttgaaagaaatagcattgtttaagacttttaatttctacactgaatttttaactgaatactttttataagagattacagcttattgatagaatatacaccttatagtgtttttgtttttaacaataaaataaaatcttgccacagtcgcattagaaaaagctgctttaaacatactagaaagtagtttcttttcttttagaggcatttgttcattaattgagttattatttatttatttatttcttttggggaagcgtttccatgatataatttctattgaatagtagtaaaatattccctaaccccaatgctttttctttcacgcctaagattttaaaactaatcaaaaatataaccctaattttaaatatcaaaaagagccccatttttaaattcccactacgagaatttccatatataaagattgtacaagccgatttattttttttttttcgtttctttttccttttggtttgtgaaataagcaaaacttaaatgtgttgaattttctttttcttcttttgtcttccttgatattctctttgttgattatctctctatgcatatacattattttttttttcggtaaagcacttttcacaatccaaaagtagttgaaaaaatgtatttaacacagaaaaaagctttggagtaattcatattttaatactcattatttttacttgtttcttgtctttttgccaccattcctttcccatccgttattgaacaatttgtttccttaatcctagcccgtgttgttcattatttctttcttcttgctgatcaataaaagattacggtcgaggaagtttgcagttatttttttgagaataagtgagacaactcatcaaataaaacacagtattatctacttatattcatccccatctcacaggatactataataaagttaacttaaaaaaaggaaaagaaaaaagaaaaaatggtgagccctgcagttacaaacattgttttcatgcttgtcatgatgcaattatctcgtcgtattgatttagaagatgaaactattattatgtacgttagaacagcatatctaatttcggttgtctctgcctacattgtttaccaaatagtgaaacaaaaaattgtagctaagaatgatttgactaaagtcaaagttgttactccaaagaacccaatgaagccagaagaatctgaaaaagttaaatatatgactgttaaagagtacgatttggaacaagtagatcaagctatcaagggtatttggactggtgtggccatgatggcttttatgcatttatatatgaagtacactaacccattatttatgcaatgtttgaacccaattaaaggtgcattggaacacaatgttacaagaatcaatttatggggtgccaaagctgaaggtgacttacaaagaccatttaaatcaccaagtattcttgatgctttcatgaagaagccagaagagaacactgctgttgaagcttcctcttcctcctcctcatctctttcttcttctagtgaaccaaagattgtcgaactaaaagatgaaaaaacttccactaccaccactacttctgaataaaatgaaggtgtatatatgccaaatccttattcaggttgtttttccacgtctcttataaattatttttattgtaaaatcagatggatgcatccaaatatatatatctatgtacgtattatattgcagtgtatgtatctaattgtgcctgctctattttttttctttttttcatttatatatttttgatacaatataataattacatttaaaatctattaacccacgttacaaacagtcttaatggactgttctatatagcttggaagaatataaaaaaaaggaagacctttgttagatatgaaaaagagttaatattatgatatatttatttcaccgattagcaataagtaaataaaaaaaaagcatacaaaatattaacttaaaactttgtgtaaatagatgaatggcaatatctcattcataatatccaaactatcatcttcattaactaatataataatacgatttgttattgtcataaaatttcttaataaaatttgttttatgggtaatttcataatgtagaaaccactgatattttcgatatattccacaatcaacttgcaaaataatctgcatttgtttatataatcatcgttaaatctgttatggttctgattttcttggaatttattccacaaattcaaacaactgctgcttgaaatctcaattgaatatctatctaataatgaatccttcttttgagattcaaacattatttttactgaataaaattgcgaagcacttttacctggtatcagattatccaatatatgaaacatgtcactattatcaaatgttactggccataatattacacctgtttcgtctttcaaccattgagaaaattgattccacaattgttgatttaaactaagatcactgttacaactggacacaatcatcctctgatcatgtatgttaccataaaaatgcaattcgaattgatcattttttatataacaactatagctcccatttctttttattgcgttgttttcttcaaacaccaaatttatttgcaacaattcttccaattcgtagatattgtcagaattcaaaataataaatcgatttaacccatagaagttacattcagagggcatctggctattgttgactaatatatattacctaatattagacgatgcacagtatgttaaaaaagaaaaatagagaacaaaatgtgatgttgtaagaaacatcatatgtccttctatcgccttttttttaaatctttctgtaatttttttttttttcatttttctttatgagttcacaataatgatttaaacattatatattcacagaccgaatagacaaaggtataattgatattgagtatgtgcaacattacatatgttaagattccctacacatattgtggatactcaaagactaaacaatatattacattttaaaaaattatatttatcaagttaaccaaagctaggatcatccatggaataatgtaaatataagcatacacacacacacatacaaacatatatatgagactgagtcgaatagaaatattataacaacaataattagaagaacttttcaggtaaatctaacctaccatatctaagaaaattttcgtcattatgcttgtaggtatttcgagaataacctaaaactatttgataacagtgcctttttttttaaaaaatcattaactgtttgatgacttatcaaaagagcattatagacctatacgtagattgaatcagcctgcaagcacattcttgagacgcgtcagacacacgccttacaatgactagaatatactctgaatcgtctatcggtaggcttgtttaattgtttggctatttgtttgttggcattttcagcttaattgttgtagtctccttgggattccattcatctctttgtttggtcttgctttcaatcgtttctttttctttttcggtgaaaaatttgacctgtgatgcctttgcagaaataaaaaaaaaaaaataattttttttcttcacatcttgctaatagatatcgagccatctgtccttcttgggaaagacaaatatataaaaaggttacttggatacaatgcaaagatgagagtttcattttgcctgccttataatgtttgttttttttgatatgttgaatttagaacaaagtataagaaacaagcatcaggtttaatatcctttcctccccccaaagaaaaaaatgtctgaagaaattactcacccaactattgtcgacggatggttcagagaaatctctgataccatgtggccaggtcaagccatgaccttaaaggttgaaaaggtccttcaccatgagaaatctaaatatcaagatgttcttatcttcaaatctactgattacggtaatgtcttggtcttagacaatgccattcaagttactgaacgtgacgaattctcataccaagaaatgattgctcatttagctttaaactctcatccaaatccaaagaaggttttagtcattggtggtggtgatggaggtgttcttagagaaattgttaagcatgaatctgttgaagaagctattctttgtgacattgatgaagctgtcattagactttctaaacaatacttgccaaacatggccgcttcttacaaccatccaaaggtcaaggttcatgttggtgatggtttccagttcttaagggattatcaaaacacttttgatgtgattatcaccgattcttcagatccggaaggtccagctgaaagtttattccaaaaaccatatttcgaattattaaatgatgctttgactgaaaggggtgtaattactactcaaggtgaaagtttttggtgccatttacctattattaagaaagtcaaacaaagttgtcgtgaagtgttcccagtcgttgaatatgcttggacttctattccaacttatccaagtggtatgattggtttcatggtttgttgtaaggacaagaatgctaatgtcaagaaaccattacgttctattccaccagaagaagaagaaaaacaatacaaatattacagcaaagccattcatgaggcttcttttgttcttccaacttgggttgctaaagaattaaaataaatgtgctgttagcatacttccttttctaaggtgactctagtggtaattttaccgtttatctgtctttttctttcttttttacattaaatacattcatattctaatatatgttcatacatatatttattatatatatacacatacgtatatatatataatacttgtaaagttcctcgcactgtcaatttttcactattctattgtatgttgttatgcttattaatagataatctttgcatctttcatacaattctcccaacttgactgccatctatatcgtgattcctttatagctccttttttcaaactttcagcaatacctttatctttcactgcaaatattatggatccatgtaactctcttctatcagcaaattttagaccattgatgttgtgtttaactaattcatctaaagtaggataattaaatgcgataactggaataccagatccgaacatatccaaaatcttcataggtagatcaagtcctgagcttgaattatgcaatgaaataccgtaatcacataggcttagcaatttggggtagtcttctggactcaaccatagaaattcgatatggacacgattccaacttttgaaagcgttcacttctttcacaattttgggtttcaatggaccctttcctgtaattagacataatattcttggcaatgtcttgtcaaatttttcaaacgaattttcatatatctttaatgcacctaatagaatacttatatcttcatctggtgtaaatgatgtagaggtaacaataatcttatcaccacatgataagtcaaacccttttgggataatatttttaaaaaatggttctgaaagaatagctgcagtccttttttctatgatggactcagtattactcttatcagtgtcttcattagtactgttaaaaggtttgaattgagaagctggtctatcatataaaacataacatctattcgaattgagccaaaacttattaataagaaaatctttcatggtattagttacggtcaaattataatcagccatatgggaaaaaactaactcaacaaaaatagaaataattactaaaggatgagaggtattcccattatatttcaatcttaaaatagaataagctaaattgtgccaatcgataattaactttgttcctgtaagaatcctgtatagtgccacaataggtaaaatggggatacttggtggattttgaatcagaatataattactacctcttagttcccagagatgtttaataattccaaaaaattggtagaatactttctgtatcatttcaattattccattctttgatgatttaattccttgtaaagtatgaatagtaatattattatcttttaatatgaattcaggtaaggtactatctacataaccacataattcaacttgaaatcccttactgctaaaacttcttgcatggtaacatatacggggtgaatgacctaaatctcctaatacatatatgataattctttttttcattgatccagacccaaccaaaatatatggaattatgtaataaaccactaatgggatacttaaatacataataataaggcttattagccatttaggtagttcgatgtcccacattgaaacttccttttttttttactatagtactattaaatcacgttaataaatcgccaatattagtatattctttctattgatttgtggatggcttctaatgtcaataataaaccaataacaagcttcattaattatttaaaccgattgttgtctgaggaaccctcatctggtattatttccctttttattccattccaggctttactattcgagtcttattgggaaactttttttttattctgacaacccgttgtaaatgatcagatttcgatatttttttagttttttactctaataaaaccaaatctaaactaataaagatatcttgacagaagaacggaaaactaatcatgatagactatagtgcttggttggaggtgttttttgatagttagctacattttctattggtaacttgtcactagtctttcaccacaaatagttgtaaaaaaggttttctattcactttacagtgcaattatagctttaaggaacatcctttattggaatccactcgaaagttagcaagattaaacaaaacccaatatagtgtgaatatcgtctaaaaacaaggttaagtaagaaaaaaataaataagaatataatgtcctccaacttaactgaagaacaaattgccgagtttaaggaagcctttgctctttttgacaaggataataatggttatatttcctctagtgaattagctactgtaatgagatctttagggctttcaccaagtgaagctgaagtagctgacttaatgaacgaaattgatgtagatggtaaccataaaattgagtttagtgaatttttagcccttatgtcccgtcagttaaaatcaactgattccgaacaagaattactcgaagccttcaaagtttttgataaaaatggggatggtttaatttcagctgccgaattaaaacacgtattaacatcaattggtgaaaaattaactgatgctgaggttgatgacatgttaaaagaagtcagtgacggttcaggagagattgacattcaacaatttgcagctttattatctaaataatactattgatatccttaaatacacgtatcgttggttatgaagagaataaacatttaaatatctatcattaaatatgttattaaatatggaatatatgcacctaatatatagttttatatatgcacttgaaagcaaatatgttaatagatactctatcgttgataatcttacatgctttttgttttgaccctaaaaattagtatctttcgaaatatcagaattaatcgatgatgatgtgattttcaatgctgggcaacaagaacaagatgtattaatgtgatacagtcttaaaagaaaactattcatcaattgattaaaaggtatatatttatataatcttcatacacaatttcaggatatataaaataaaagaaaaaatgtatatttgtccatgtagaagttcaaaaatattgcaaaacaatatctgttcaattagtatgaattctatcatgcgaagctggtacagcttcttttttataaattgcaaatggatttatgtcatcatcattactttgagaacctatactttctcttgaaccattatcaatctcatttggtaaaggcattctggctcttcgatttgtaggaacaaatgtgtcattatggtatttgggaattggaggttgtttccatgtattttgtgggattagtggctgtactcttctacttggaggaattggtggttgttctctaattagtggggaaggggtttgaattgattctttcgcagccctctctatatgtggatgatctactatagaattggatgtattagtcttcaaactgtttatggatgtttcatcagtggcatcattgctgttcaatatattgtcaagattttttggtttgggtttaacggctggaggttgctttttgcttgcttcagaataattttttaatatagaagccgaatgagccttttcaaacaaaattttattcaatgcctgaggtttaggcttaactggaggtggtggtgtacttttatgttttttagtatcatgaattgacatgttggttattgttgaatttaactcttgaataaaagtattagatgggttactaggagaattagaatgtgaagatatattctgaaccggtattgtttcttctttcggtttattacttagatttattgtatcattatgattaaatgaaagtattgaacgagactgtggcttggaaagattgttataatgactcgcactttgttcatgttcatgtatttcatctaatttatcctgtacattattctttgaggtatttgatctaaaaggttttggtggtggttcaaactctgaaattgggtgagttattgatttggttgagggctcctctatgtagcttgctcctgtattgataacagattttttatcgtttgatattgaagtactttgtttatgtttttctggtaatgttggtgcaggaaaagactcagcatagcttgaagatgattttctagtcaatgtcctactttctcccacattagaatctcttctaaacggttttggaggtggctgaaacttaacatttcttgctgtatagaccccagtaataggattattagtttgcatatcatcatttcctaaattgttttcctctatattttgttccatagattgatttgaattgtcttctgactttttattgtttatatttctcttaggtaacaatggcggtggttgacttattgattgatggttaccaataggagcaggggaatatacttgtggagaataactactatttactgatctacttccttcattgtcaatacgtctatggggctgaggaggtggagaaaaattaactataggttcatgataagtacctgaaacagtgttatttaccttttcttcttctttcttattttgttctatattttctacagaattgtttggtgatgttaaagtttcagacatatcaactgtagaagtttgagaaaattcagcattagttgttgtcgcaatctgacctatttctggagaggaagaaattatattatttgatgattgattgaaaggagtatctctttgagaatgttttactgtaatacttggagaatttcctgttgatgagtcagcattacttctgtctttatgcattggtggtggagcaaatttacttaggtctacttctggtaagataatggctggctgctttttcttctcttcatattcttctctattaaatggtgtgacctcaaagtgagggcctatactagatggtgtagaattaatagattctgacctctcgaagttattagtttgttgtctaactggtattggaggtcttgggggaggaacaggtaaaggcctttgtatttcatttagtaaaggttggggtttgaattgttgagtcgcttgcatatattgagtttgtaatggagtatttcctaattgttgattttgtgtgccattttgaaaatttgctgtcgagacataattttgtgaggatattggaacttcattatattgtgcaatatattgatcattaggtttctgaggagtaatattgtgagaaagaggttgcgataagttctgctgttgttggtaaccatttacttgcaaagtatctgtagtattgtattggtaattaacataattttgttgtggctggttctgatattgattgttagcagctattgtttgctgattgaccgcttgggttccaggtggaatatttaatatgggtgcttcgtttgcactgactatttttccattaccagcatattgtttttgaccttgtctcaatggaggagcaggaaaacttttcggatcacttagtctgtcaatagatactgcgtcatttctctctgtatcagaatcagtgttattgttgttgttctgacctttccctttatgagcattatattggtttttacccaggtgataaccagtcttggcaacatatttagttccctgataaccatattttccagcagttaataatcctgatttaatggagcctttatttttgttccaaaaatcactcattacttaaatgataaatcaataaagttaataatcgtccaatggttttatgtttttgaaaaatcatacttaatttagaaaaatgaactacgaaacaattgttgtcaagaactattaattagaacaattatataattgctatcaaacatttaagactctattttgtaatatcaacttctttcgaactatagaaaaatgaaaattttgaaaaaaaggggtaagagaaatagaaaaatggaatttgataataacccaaagaaaacataaaaatcaaagtaagcaatataaaaaacagataggaatcttccaatataagatgatataactgtctgttcggttttgttaaatgtagaatatggaagtatttttataacatgagaatacaaggatcaagaatattttttgaaatttctttgtatgtaagtatatgtgttatatctaaaaaacgtccaagaatttccaaaaaataattattttagtcactaattttagttaggttaaatgagagaaattagtattaaaacaataaagatctttatctttctatattagatctaacaaggaaaccagaatattaaacgcgtgtatattttaaaaggctttcctttagatgtagggtttcaagttattatcaaaactgatagaaatattaacaggaaggttatttttatatatgacagatcaaaaaaacatctattaagttcttttcttagttacccaaaatgaggtataattcactcatgacactaaacataacttgaatattcataatccaattggtcaacattagatgctagatgactattagtagtaattattttgatggtttctttttcagagaagtgaacattagttattagcttgtcaataagggttcgtatttcttagattatctaagtgtgttttccataggatgatacgtcagatcatctaacattaaatgcttatttattggttttttaagatagtgttagaaatggatagtggaaaaggtagacataacttggagaatacggtaccttgtcaacttcagtaagattattagctttagatgtttttattggtaatatactttttctaacttattaatttaagtggtttggcacgcttttatagtttactttagctagtttacatttctaaggatagaaattgtacatctaagaagggaaaccaaaagaatatttaaaggaaaataaaactacgttgatcatcatcgagatattgttttttattgtttttgatgggtattgtcacagtgtgctattcaactttaaagttttcctttgtaacattcctgatataactgtttagggctttgtttagaaaaatgagagttgacgatatttttctaaactttcctttttgaaaaattttacaaacatacataaaaacaggagtaaccaacataaagtacaagagagcaaccaagaacagacaataacgaacaataacgaacgagaataaggtacaaggaacaaaaaaggtattacctaggtttagatatatagtatataagtgtataactattaggctatctgagattaggaatatagatatatagacatataggaatattacatctagagatatagaaagagtctatatcttatatctatccaagtgaaatattattgagatttcaacaagaattaccgttatcagaaacacataacctcagggttattacaacacccagaacaaaaaatgaagggtgcgaggttcgaactcgcgcggacaccgtccaacagatcttaagtctgccgccttagaccactcggccaaccctccttgaagtccacaatttgttgtagtatggtatggtgaaattctttgtgtattccagggaagcgcaaataatattaatagtcattcaagtaatcaattataggcgataatataattactaaaatggtcttatatattgagcggcttatatcgagctaatttatttatccaaagttacttaacttgttacttgcttgttgttctctttttgttcatatataatatataaattatttacaagaaacggttatggaagatgatcttttatctccagaaaacgttgtccttttatatgttttctggagctcgatcgattattcagattagtacgttaatgacttgactgattcaccctaaaatttattacattaatttaggtgcactagtggattagaactgcaccccaattctctaatcatggtgattagtaatacacgtgggacttattaaaacaataggtaaattctagatttgccaaaatcttatgtaatccaatctctttattatgcagcttctaatgctgtagcacgtgtatggcttattaagacaataaatagttctagattcattcaggatcttatgtaatcttgatggttataactattctattccacaacaattgtttggtcagttctaatccactagtgcacctaaattaatgtaataaattttagggtgaatcagtcaagtcattaacgtactaatctgaataatcgatcgagctccagaaaacatataaaaggacaacgttttctggagataaaagatcatcttccataaccgtttcttgtaaataatttatatattatatatgaacaaaaagagaacaacaagcaagtaacaagttaagtaactttggataaataaattagctcgatataagccgctcaatatataagaccattttagtaattatattatcgcctataattgattacttgaatgactattaatattatttgcgcttccctggaatacacaaagaatttcaccacctcataatacaacaacaatggttacttttaggcactatggccgagtggttaaggcgacagacttgaaatctgttgggctctgcccgcgctggttcaaatcctgctggtgtcgattttttgtgttatagtttaacttaatatcattatacacgattttccaaaaattagatttgtctactcggactattgcttatatatatagtacagtttatatgcaaagacaaaactaagattttctttttattttctcatattttatttataaaaagatattttttgagcctggaagtcctgctacagtgataaaattcttaaggtatttattgtattcaaaaatgtctgatctcttttacataaaatttgaaaacgtatctgtgtgtggaggtgaaatattgtaaaaattgacttattagtttttgttccttgtcttattatatgatttcaacttttaaaagatcaatttattatccctttttatttaatcagtatttcctttttaggttttaaaagtattataaataacattgtttagtagttcatttctaattattttctaaattatttatatattttcatctaatatttttaacatttttattataaaaaatattactctactttgagtaaaaagtatgtagataaaaccccttagtatcttaaggctccctgatgaacgcttttataaattttattaataattttataattactggaatgacatgtacactcaatgtattaagatgttgagattattttattcaattttacttttatgtgtatcattaaaattagttactaaagaatttttactaaaatggaattaaaattattttatttatggaaaatataatattataacttgtttatttttatatataatattattgttggttaaaaaaaacaaagaaaaacagaaacatattttatagaataataagatttttgtaatggtaacaacaataataaatatagtaaaataatccctaatataatcaaaaatgtttacattccttctttaaataagtacacacatatattagtatatattaagttgacaatgtttgtattaaaaaaatttatacgaaaacctgaaaaacataatcggtgaactagtcataaggtatacacatttgaaagataaaaatataaagtaggactaatgctcaataagaaccgtcacagtatacaatttttagagttcaaaatctcatttaggaaaaaattattctacttttatgaatttccaagtttccccataattccattatatattttgttaaattacttatatatggagaatgtatgtgtgaggggttatctcaaatgatatactaaaatatggatatttaatgagaatgagcgtctttattcattggatatatagtaaacattctcaatattatattaaacagatttagtatacaaaattataataaagttcttcactttttttttctctatatacaacatagaaatagtaatatacaaagattgcaaataagataaaaataatgtatgatgaagtccttggctttatatatgttaacatttagccattttcctctacgaacagtaagatatttaataaacaaactcaacaacctttggtgatctctcaacaattattactcaacaatttatcgtttagtgtctgctaaaatcttattgttctatctatttcattatggaacattttatttcaacaatattaattatatatatataaacacttataaattatataattggttgattctaactatcaaatagattagtcttggatatttgtcttgtttttttttttgattaacctattagatagaataggtgtattaatgctgataattacctcttgcacttcctctcaataatcaaagatctcttaagtaagtttcttagtaatttaccaccaatgttcatccgacgatcgttcgttcgttcgaatacactcacaaccttggacccagagtttcggtagttccaagttctttgtctcgacattagaagttacccgcagactacgtactttagaatttccagttagaactccttacagtatgttaatcattggcttttgaattgtataactcttagatagttttttaacgcatttcgaggatgataaaacttataatatattataaatagcaatccaaatgcttatttataataatatttgttcgatatttttgaaaaaccttaattttaaaatgaaattctaccagaattttaaatatttttatacattcattatgcaaaaatactattgatacgatctctttcaaaaaattttataaaattaactatttcaaactaacaatatgaacagtataaacagtataaaatagtaaatttattgaaatgaaattagagatctatatgataatctaaattctttgtaccaaatgactgaaaaaaatttataacaacatataaaagaagaattgaaataaaatacactacaatgtatattagttatatatatatatattaagtatgtaaaacaaaataaaataagcaatgcaataacaattcaaaatactactaatatcctattgtaagttctattctcttattatattaatctaaaataaatactaatagaatatttgctactgaaaccttacgttaacaggattatcactagtcaaccaatatgtttttggtcaaaatgattgttttgattataggactaaaaaattatataaatttattaggcattaaaatataaactattttttttattcaaaaattgatgtaaaacaaagtcaacaattaatattgtgtcaaatataactacataacaatgtaaaatagagaaacaaataattttgatccttcttgctaaaggaaatattaagattttaattgacatgtattcttcctgaataattcctctgtgatatcaggaatagattgtcgaataaattcatatgtctattaatgtgattcataatattggttatagagtacatataaagagtgtttgtaaaataaataagaaatattattttttaaatttactatgcaaaacattacttctttcacctaaattaaaatggctaggagtaatacctgagtataataaaaaaatataaaaagctaatttcataaaattattacaacacgatattctttgaatttatttatagctagcattctatagatactcatttaaatactaaaaattgcattttttagaccaataattatgctgaaatcgaacatgctagaaaaaataatagaccaactagattttagtaaacactaattgataagcaaaaagtagaaaatgtattgtttgcttattagtagatgtaaacaaacctcatcaataatttggtgctgtacgtatacaagataggccagatatgaaaatatataaagtcaacattttttttcatatcatgtttctccccttatcatcttatatacattatcgttatatattatatatataaataaaaaaaccgaagaactttattataattttgtattctaaatctatctaatataattttaagaatgtctactatatatccaatgactacaggcactaattctcatcaaatcacaacttgaggtatctttttctttacaacaaatttttatggtagtatttatgttatgttgtttctacatgccgtttattttttataatgtatatttcgtgattattattgataccaaaggtggtatccacaataatttagtttttgatttaacaaacttatatagaatatcaagcaaagatactacaagaatgtatttagtaaccttattataatataaactcaaaattttaaagaaacaagaatgaaaaaaaagaaaactttcttgccagaaagaatttgcattattttaaaatattatatagaacataatttgaagaaatattgtataattcgatataagttccattaccttttttcttagtgattttcttattgaatgttgttgaaactctagctatatcatatatttaacgaaactaaatcaattaacagtatctacagacagaaacatgtaccttattgctttaaaaaaaataacaaacctagaaaaataagtcaaaaagaaagttaatacaatattctttttatttataaagtgttttagatattaaataaaaaaaaataactctatatatctattccacctaaagatattcttaatcccataaaaggtatattcacagacctttttattattattgtttttgttgttgtcatatgtttccaaacattactcaaaaaatcttttttttcctttcaacaattaaactttttagccaagtatataccatgtgctacattttgaagacgagcatctaatttatacccctccttttcaagtttaattaattcttcatgaagatctgttaatggaactttaaaacattcaataaattcgttttcttctaacgctgggattggattctgattttcaggtaatgccatatcaacttcaacaaccacaagagacatgtttgtattagtaaaaccaggatcattgtagatcacaggaccttgttcaatgatcttaccaatataacctgtttcttcttttaattctcttaaagcagcagtaggaacatcctcatttgcatcgattaaccctgctggtacttcaatacaaacaccttctactggtggtctaaattgtttttgcaagagtacttgatcaggggttccatctttataccttaaaattgtgaacatcccgataccatcgatatttccagaatttcttgttgttctaactgcactatcccatgctctttcttttccatttggatccttataagttattttttccaatccaatccatttacagtcacttgtgtctttaaccttttcaatcttcaaaatctttgcaagctctggcttaccttttaatacaaccatttttgaaaaacggcttgaaacaggaatgattattttgtttagtaatacccagcttcttagcatttaacttaaaataaaaaccgaaactaaaaaacatttgttcaatacaaagccaactctgcaacatacaaaaataatttctaaccgaatgaaataacatcatgataaacacactatacatattaaataaactttcaacagatcttttgcaaataatgacctacagagttttatctctctccgtttagtattagaaagtattttctaattacagtttgttcctccttcaattttattagactttaaattttttttctcattttttgcatttttttttaagttttaatattcgagaaaaataaaactactgtacatagaaatttatatcattacataggtagttaatacaacaaaccatttgcctgcatttagatttgcaatttcactagccattgcttcataattttgtgtaacaaaaatctatagagggaatatcctttttatcaagcatggaggggaatgttaaagcacagatacaaaagtatttagtggaatcaggaaattatgaaaagtatgacttattatccttcttcttttttactcagttttttaaaataattatttgaaatcaacagataggtggtttagcaacttctatctcaagttagcaccaccaatatgatatgctctaatgatgaattagatacaacaaatatacatatacatataactaatcattcaacttttactaacatttactattgatttatatgtctatcatatccttctttttttcaatgtatttttattttttaatattccattctattaacagaatatcgaatttattaactgaaaggttattacaagatggatggatcgataagatcaggactttgacaatggaagaaatcacaaagaatgaaaaagctggatatattgaaatattgaataaaattgaaccacaagcaatgggtatgtttgataatattattaaaatggatcctttacaaatcatatctatatttcaaataaaagaaaataaaaaatggtcacaatttagaagaaacatttttatatgagatgtagaaggaaacaagaatgaaatttatgcatataaatactaacaaaacaattgttattataaaaaaattcatgtttttattgaattactaaaaaaaacaaaacccttatctatgtacatatgattgctaaagagatggttgctcctgatactaaagaattagttatgaaacaaattagagacttccttgatgatattgttgatactaagtaaatttagaatttatcgcttacattaataagtaaaatgttgtcatggggctgacagaaaagaagggaaggaagcgaaaaaaaccataacaaggatcaacttaattgatgattctatgtaataaaactacacaaatagaatatctataaaaaaaagaagtaaagaaaaaaataggtagatattctcccttatataaacacgcacacacaaacatatatataaataacacagcaactctatctaagattatcagcaaatgtaagtatataagtatgcattatatcatcatgcatcgtaattccaccattttatagaaattgatgagagagacaatactgttccttcgagaaattaattgccagggcaaccaaaaaatcattacccttttgagatattacacagaaaaaattaacaatagaacagtggaaataaatttctttttttttctttatacttttttatcgctctgtataattggggtgtatgtgtttctattgtttaccagtacgaatccatgtggaagaaaatgtaatgtgtagatttctgcatatatatatatataaaataactagtgatggagatgaggtgtgatgaaatgaaaaatgaactctttttgttattagtttaaactctatctactggatatcttttcaaaatactcgcacattttctcaatattgacagagatctctcctagtcagtctatataaaaactgttattcttaaatagaactattgaataataaactttaatgttggaagaaggtggatttttacgaagacctcaaactagatctagaacaggaactgttaccaagaaagtaaattatgttgaaatgtcagatagtgatgaagatgaagctacgttgaaatcacagtacagttctgattcagtaactgaggtaaaaattgcagataacaaaagcaataacattgacatagatactgacgatgccgactatgtagaagatagtttgacacctgtggatgatataccatatcaacataacaattccagtacctcttcgagcgaagatattaaaaaagaggatataggtaaggttaataccaaagcaaataaaagaaatgttgaagaggaaggaaaattgttttctgcacctaataaagacactgaatgtattattttgggcgaagaagacgaacccttaacaaagaaacgtaaagttaccagaaagagaaagacatctaccaagaaaaaacaacctaagttgacaccttaccaaagaaatacacaaagattatttgataaccatcccgaattaaaaaatgtattcccagatcttcaaaatgcaccagattacatgcctcaccgtaccacacagcctgaaggacttagattgaaactacttccatttcaactggaaggtttacattggttattatctcaagaaaatagtaagtataatggtggtgtcttagcagatgaaatggggatgggtaaaactatccaaactattgcattattgatgtatgatcgaaccaagaggccgtctttggttgtggctcctactattgctttaattcaatggaaaaacgaaattgatcaacacacccaaggtaaactaaaggtatatttattccatggaactaacaaaactaccaatatcaatgatttagctgactacgatgttatattaaccacatacgctgttattgaatctgtatttagaaaacaaaattatgggtttagaagaaaatcaggtttagtcaaagaaaaatctgttttacatcacattgatttttatagagttatactagatgaagcacataacattaaagatagacaaagtaatacagcaagagccgtaaatatgataaaaactcaaaaaagatggtgtttaagtgggacacctttacaaaataggattggtgaaatgtattcacttataagatttttagatattgaaccattttctaaatatttttgcactaaatgtgattgtgcatcaaaagaatggaagttctctgataatatgcactgtgaccgttgtaaccatgttattatgcagcatacaaatttttttaaccactttatgttaaaaaatatccaaaagtatggtgttgaaggtccagggttagagtcattcaacaatattcaattactacttaaaaatatcatgttaaggcgaaccaaggccgaacgtgctgatgacctaggcttaccaccaaggattgtaaccgtaaggcgtgactactttaatgaagaagaaaaagatttatacagaagtttgtatatggatgtgaagagaaaatataactcttatgttgaacaaggtgttgtgttgaataattacgctaatatcttctcattaattacgagaatgagacagattgcagatcatccagatttggtgttgaagaggtatagaaaccaactcgatgacaacggtgtaattatttgccaattatgtgatgatgaggcagaggaacctatagaatcaagatgtcaccatagattctgtaggttatgtatcaaagaatacattgaatcgtttatggagacaagcaataaccgcctgacttgtcctgtttgtcacattggtttaagtattgaccttacacaaccctccttggaagtagatatagaagtatttaagaagcaaagtattgtcagtagattaaagctcgatgggtcatggagatcgtcaaccaaaatagaggcattggttgaagaactatataaattacgttccaaagtaaaaactatcaaatcaattgtgttttctcagttcactagtatgttagacttggtagagtggcgtttaaaaagagcggggttccaaacagtgaaacttcaaggtagtatgtcaccagttcaaagagatgagacaatcaaatactttatgaataatattcgctgtgaagtctttttagtcagtttaaaggccggtggtgttgcattaaatttgtgcgaggcttcgcaagttttcattttagatccatggtggaatccaagtgtagaatggcaaagtggtgatagagtccatagaattggacaatatagaccggtgaagattacaagattctgtattgaagatagtatagaatcaagaatcatagagttacaagaaaaaaaagcaaatatgataaatgccacaatcaatcaagatgaagccgcaattaatagattaacccctgatgatttacaattcttatttaacaactaaatatttgcattaacacaatttctatatgatgaaacaagtatttatttttttttttttaaaaatgactacaatttttatatagttagtaatattatatttaggatgaagcagagcttgaacgagcacctgcaccagatgaaactaagtcgatttgttcttgagagattgatatttctggtaaacgtaattctgctggacctattggaggtggaagatatccaaccttaaccaagaaggcgatatatataccgatttgttcaagagtagcaccagcacctgcagatttgtcaatccctgtccatttagaatctttctttaaggattccactgcatttgaatcatccaattctggggctctagtgttgcctggcaaatcatctaagaccatgtgtaacaatggatataatgcattgtccttattttcatcgataatagcagtctctagagatttcctccaagaatcgtaatcttcaatctcaacatcataaccgtattgttctaagatgaacaaatagtccttgaataggatacgtggatgagcagtaacatgagcaacagctaattcatctttctttggtggattcaaagaagcagaaacaacaacttgagctacgtgatcaactggaaccatattaactgtattgttaatatcagggattttacctaattgcacagcactctttaaacatcttaacaagaaatcatctgtattacaggaaccgttcttagagttacctgtaacataacctggtctaataatacaacctctaagacctcttttaccagcatgtctgataacatattctgctgcccattttgattgaccataacccccacctaaaccggtagaagaaccttgtaaatcatcagattccaaaatgcctgctttaccttcaccaactaatttatcagatagcttaaagaagtaatcagtatctaaagttgaggtagaggaaacaaaattaaagaactttgctttaccttcagcagccaaattcataacattgattgtagaaataacatttgcatctctcatttttaagtatggataaacccaatgaactaacgcaccattatgaataattacatcaatagcattagttaaattagcccatttttcattagatagaccaaattgagactttgataaatcacctaaaacaatttcaatactttttgagaaactgtccttccaagtaccataagtagttcctgccttaattaatctttctaaagcagctttctcatctgcagcacgaacatgagcataaactttaaaggatactgaaacattagaacggttcagtaaattggcaacaatgtaagaaccaaggaaaccagttgtaccagtaacaaaaacgttaatgtgttgagttacggctggtacaaagtcttcacgagatggataagacactggtaaagtttcaactaacttcttggcatcagcagcataatcatatgttagggtagtttcctttgcaacttcaaccttaccagtctctctaatcttagcaatttcaccggcaaatgctttgattgtaggatatttaaagatagttcctaatggtaaatcaatttttaattgcttctttacagtaaaaatcattttagtagccaaaatagaatgaccacctagatcaaagaaagaatcatcaacagaaacagtggctggttttgttggtaatacactcagccatatgtcacgaactgcacgttcaatatcattaaactcggactcatcgattttagaggaaacattagctgccaccaaatctaactgcttgttagttgggaattgcaactttggtttatctactttaccatttggatttaaaggtaatttatcccaaacaacaattagagatggaattgcataactagctaatcgtttctttaggaacaatttaatatctttagcaagcaaatgataaccaactaaacccttaacagtttgatcagactttaattcttcaggaactgatgtttgaaatttagctagctcctctggtttatcaaatcttgggaccataaaagtaatcaaagtcttttcattgtctgaattattacgaaccaatgtaatattttctctaactaaaggatgctgagagatgtgagtatcaatttcacctaattcaattctaaaacctctaatcttaacttgatcatcagctctaccacaacattcacaattaccatttggtaaataacgacctaaatcaccagttctatacattctgtctcttggacccttccagaattccctccatggttcattattatctttatctaaataatcccagtgatgttcatctacaaaccaattattgatgaatttctctttattcaaatcaggtaaccctctgtaaccttcagctaaaccaccagcacgaacgtagatctcacctacttcaccaacgccacatatttgagtgcgatcatttctattaacaactaacaactgaacgttaaacatacctctaccagctggcatgacatcttttaatctttttaagaattctggatcatcgctctttgatttaacttcaaagaaggatactgcacgttgtgtttcagtagtaccatacatattaacaatacgacaattttctgctaaagtttgtaaacgtaaacaatcacgtttagttaagatatctcctacaaaaaaggcgtgatgtagctttgggaaaggtgtagtagcttgagcagttaaaagttgacccatagcaggagtcaagtgtgttacagtacagccatgaacactcatccattcagctagtttacctggcgtgccaatatcatcctcagttggaacatataattgagcacctaagaataatggtgtaaacatatctctttgaattggatcatgagctataccacttaacatagtgaatttatcttcagatgaaagattaaattgtttagacatccagttaaaataatatgctaaagaaaaatgtctacccaggacaccctttggaataccttctgaaccggaagtaaaagataaagttgggttagaatcggggcccacaactaccccagttcttgtatcttttaaatgctcataaggtgccaagacgtcatcttctgttggtaaacaaccttcaagggaagcatcattttgaatagcaacagatggaatacgagtaataacatctaattccttttgtatataatcctcaactaatggatccaactgacctgcagctctaataacaatcaaaccctttggtttagcaacgcctaaataaattgtttgtctagtcggaggataagcaggatcaataaccgaaaaagtagcacctgcctttaagacacccataacacagaccatcaaatccacccctctagaggagtaaatcataacaacatcaccttttttaataccagtattaattaaataatgagccacaatatttgaagcacgatttatgtctctataagtaaatatacgtggctcaatatttgaagaaatagaaccagtttcaacaacacatcttctgtcaggaaatttgtcagcgttatcttggaaaatatcttggatacagccaacaaagtcgcaccaacctaaattagcagttggatcaggtaaagcatcttttgatgattcagttattaaattaattttagtaatgacttcaactgggttgcttaaaacagcagtcaaaaactgagtaaattgatctgccaatatttggattctttcagtggaatataataattgattatatgatatggttaaaatagaagaagaattgttatctgtagttaaatttattgccaaatctaacagatgatggttaaaacgagttaatttaataccttcatcatgcaagaaagccaaacggaacaattgtggacatttatctaaatctttttgagattgaatagtttctgaaagcgaatcaaatgaaacatcacttaattcagacagtttatctatttgtgatttaatttcattatataattcttggaaagtccaattgggtagaatagtaaatcttaatactttattgttggttatgtaaaggacaatatcatcatcaccagatagtctgtaaactaaagtagcccaagtactcaatgctgagatatatttatctttgaaaacggtttgtggtaaatctaattgaggaatttgaaaagaatagtcattttgtacagaaaatggttcattttgaggacgtaaatagtcatgtggtaaaacagttaaagttggattatccaacaattgcaaccatgattgttgttcagaaaccatactttttttttctaattatacttaaatatttctgcgtcttatgttgtcaaatttaatacttttttgcaatgaagtatttttaatatattatagttgttgtagcaactactcatgtatattacgtttcttgtattggtaggtgtggagcaaatttttctttaagagatgttaaacaagaagaaaaaggaaaaagttattcattcacttataagaaaagctacatgcatataggtatatatatatgcatagcatttaaagtttatcgaatcgtttttaaaagctcataataaattacaggtgacactgagtcatcatttcttcataaacataatagttttacgaaagggactgctattttgtttcccgtatattgtgcggaaggactgaaaataattgagattcctcgagaaaatataataatttttattttcaatcttaatctgaaaaattccgttgtatattttttcttgctcatagtgaaagaaacggattaatatcacaaatagcaaaatttgaaaaacaaaattacaataaggcaaaaaaaaaaaacaaattccatgaaataaatccggtggaatttattaagttgtttgaaattcaattagatgattaagtgattaactagataaaataaataaacttgtataaaatttattttcaccatttttcctgtctaaatgacagttaatgatatgtatgttgtttttacaaattaagaagtaaggtaaatacgattgttagtagattaactgagaactcttggaaattctaaaaagacttaattaattgatatgaaatttctgtccttttgcatattaatagtttttcaatctgcaccataataacgaagaaaatgtgtttcattctcttaattctatatatatttatccacaaataaattatagcatacatgaatatatatacataaaatatatatactatttcaaattagagaaagtaaaacaatataatcaattaatctgtcaatttacagtatacaacatccaattatatttatcctgtattcttttcaaagatacatcgattgattaataactcaactttttatcttctttaaatagaaatattgtgagactgaataagaacatacaaaactaaacaaaaaaacattgctgtctatattctattctttcctgttaacaaacctaactaatgtcaaatgacaattgttttatgcagtcttcactttaaagaaaattatatacatatgattgacaaagaaaaaagaaacactagtatacaaaagtaaggacaaaagtaaaacaaaccttagcaaaaaagtaaaaaaaaataaaacttacaagggacgtatcgcctccttccttataggttctatttttaggactacaaaaaaaaaatagtgaaaatttttattttccaaaaaaacgtcttgatttttcttttaacccttattttttattttattaacggcatatgtcttctactaaaaatatggttcgacaaaaaagtttttcaaaagacctacttttcatttagatatgacatatagatccaaaggtttcattattgtcatattttgcagcaaggctcaattaaatttaaaaaatagtaaattcatatttttccaacagtagtctacaataaaattattatcttcaagtaacaatacctttattgatgaatttgtttaagaaatacccaatctcttttattgtacagcaagttttcttcatgatagaaagagtattaccaaaatctgtaaaatgaactgtggcagggaacctttactattcttacctacatttttcaatgtctcattcatttattgtcataatctttgactaacttaatacttatacaaatcattcatttaaaaagttttcaaccatattgttattcaaggagatcatgtttttttttatctctaattccgctgatgcacccaaatatcttcatacaatataaatacagccctattatattttattaacttatttctaattttttttgcaaaagtcaaattttacaaaacacccccaaaaccctaaatgaaaaaaaaggaattataaaatcgaataaggccccttcaaaaaacaccttgaatgtatattttgtattttttttctttgtttttatttgcaaattcgctggaaaaataaattaaaaaaatatactaaacaaaacaagagaaacacataaacacacacaaccatattttagcgatgccttcgaaatctgaaatttttttcatcatcttcgatttttctgttggaaaagttttttttttcattctttattcatttccaaatttattatatcgtttttgtttcgttgttgagatgagtctccagggatgctcacccacgtacttacacgcctacttacctatgcagtttctttcttcgctcttctgttttgatatttgatctatgcagaaacttggaataaattaaaaaaaattatcaacaaaatatattgcctgacaattatctaaaatagctcttacattcttcactaagactgaccatctttataacatcaatattatctataccaatattcatctatacacatcaaaacgtacatatatatatatatatatatatattatcattacctttgatagttttaaaaaggaaattttttccgtctgagattctagttagaaataaattatgtcaagttcattttggaaatttggacaagactactctaacgagtcatcattagctaagctactgaataatgcttttattaaaatagaatctaatgagattagtgataataaccaaaatagaaataatagtagcagcaaaaatgatacagaaataaaggtgaaattagatagtccaaagaatgaagaagatctacaagaagaggataatgaagaaagtaattccaaaaaaaatcaacatgtggaattacctgatacagagactggatttaaagattatgaacctaatttggatgtattaaataatcttttagatgaagaagaattgtataccgaattgatgtgctctaattttaaattattaatatatcttaaatatccagctgttttatcaaagttgatagactatgttatggttgataatattcttgctaaagatgaaaagaaaagaaaagaattaataaataatggtgatagagatattaacaaattaaaaaatattccatcagatatagttaacaataataataataatgaggaaaattttgaggaaggaacagaaaaaatagaaatagaagaagaagaagaagatatagaatctcaaagagctcatatggctgctgaaattctttctgctgatgtctggcccatatctgcagccattatggaacatgaagatttactagaaaaattatggtctataaccaacctcgcaggtgaattacctattgaagcatcaacatattttatgaaaattaatgatagactattagatatgaatatgtctggtatgattgaatttattctgactcaagataatattgttgacagatttttgaatcatattgatgatccaccattgattgattttttcctaaaagttatctctacagataaaccagatataaataatggggtaattaaaagattaaaagagcaaggacttataccgaaattgatagaactattaaatcctgaatataatcattctgtccagtctgcagctgcagatttcttaaaagctttattagcaattagtggcaactgtgtggatgaaattgcctcgtctattggtccaaatgaattgactagacaattagcatcccctaaggttatggagagactcatccaaatcatgttaaaaggtggtacttcattaaataatggagtcggtatcattattgaattaataaggaaaaataactcagattatgattatgtacaaattatgtttactacattagagacgcatcctcccaatgatagagactccatatatttgggtcatatgttgaagttgttccataaatatatgcctaagttcaatgatatcttggttaatacgtctatgccgatcttagatacatcatttggtagaattgaacctttagggtttgaaagatttaagatttgcgaattaattgctgagttgttacattgttctaatatggggttagttaatgaaaagaaaggtgaagacattgttcttgaacgtgacagagtaagagctagacttttggcagatgaaaacgacaattatagtgaaaatgatgacgaagaaaacagctctcgtgaacaaaatgatgttacagaaagtttgaattctttaactattgagaatggaccacatcaaaatgaaacagacaagtcttctattaacatagacaacaactataacaatatggaggaacatagtgaagaattttctgaagtcatcccagatgatgaatctgagatcgaaaaattgaaagaaaaggccgtggttggtgatttgttgaaaatgtcattattagatacgcaaattatcactactattatagagatgttttttcatttctcttggaataatttcttacataatgttgtatttgatattatccaacagatattcaatggtccattaaaatctgggtttaatagatttttaataaaagatcttttaactaatactgaacttaccaaattgattattgaaggtgaaagagactgtgtaagacaagaagaggaaaaaaaaccaaggttaggttatatcggccatctgaccttaatagcggaagagattgtaaaatttagtgcatatcttgatgaaatgaatatcaacttcacaactaataccataaatgattgcttagctgattcaaattggaaggattatgtagaaactactctaagtaatagaagagaacaatatgatcttgtcttaggtgatattccaccaaatggtgatggggaaaatgatgattatgatgacggggattcaaatgaagatagattctctgaacacgtatacggtactgaacatatcattttcacaaatgacttagatgaagatggagaagatatagataatgataatgaggatccatacgaagacgctatcaatcatttaccaggtgaaaaagaagataatgctgatgttaaggaaggagaagaaaacgtcgacgatgaatatgaaagtaacaaccataaagattcaactagttttctatcttcatcagagtctgaaaaaaattttgttcagaatgacaatatacttataaatattacagacactactaaagggttacaaaacaacgaagaagaagaggaatatgctgaatattcagagagagataacaaaaactactaccagtacgttgattctaatatgaagaaagcaggcacatatgtagcgactattgactctcatcacgatgatgaagaatcggaaaataatgatggaaaaatgcatcgtaaacaatatagtcctagtaaatttggtcaaacaatcacaaaaactgttataccgacatctcctgctggcttttttgattatgagattagttcatctgacgaagaagataatcttgtatcaagccaagattatatcgaacagaatgataaacgtagaaaactaagcaaaagaggaggttattgtgacgatgaagagaataatgacgatcttcttgaagacacaacattaagtgaaacagccgcatggaatggagagtcaagatctccctcatttaaattgaaccgcgtttctaataataataagccaagcttggcacaattacatgatgaggatattttccagcatcaatttgaaatggatatgatgcatgactccagtgtatatcctggattgagtcgagttgacagtacaacaataaatgatatcagtatagcacatgtgattccaataatgagtctacaggatgaaagcgatgatgaagacaactatttagatcccaatgatgatggacaatcgtatgctaaaccaaataacccattatataatgacaccatgaaaggtatggcgtcatattattcaaatagtgtatattattcttctgaaggatatactactgctgataatggatccgatgaagaggaatcaagcgaaaatagtgacgaaggagagatggatcataaattactaaataatttacaagatagctctatggaagaatcttttatcttatacagatctgcaagtcatgacgaagaaaagtggagttaactgatgagacataattttattggggtatattagagtacaaatttatatttcctttgattattattgttgtaaaattttcttgtttcatcttatgccctttcatttttatttagcattacattcatgtttttagcgttttctttgcatcacatcatattgaaagctattattgtataactattataatttagacattaaatattaatatatgttttgagattatttattttttttgctttcctcatttttcatttgtaaaattaagatattttacaatttatatgtttttttcagttttcttttcttttctttttttttgacattttctattttgttccactttgaagatacctaggctaataaaatgtaaggagttctaagaccagatactttctttcaaattcttgtttgcctatcatatctttatctttggtattgataaaattattgaaaaaacaataacgaagagtctcttgggacctattaacaaaaacaacaacatgtccaataaaaaaacaatctcggctttttctccattagcactttacaatttaatttcagccattggatggagttacattctatatagtgtgattttcaactatccaaaattaggtcaaccactattttttataaagactaaaagtattgtaacattagttcaatgtggtgccattattgaaattttaaactctattttgggtattgttagatccccaattttgactacaatagctcaagtagcttcaagattgttagttgtaattggtatttttcaattattaccagagagtgagaatgcacaaaagctcccatatattaccttgttatttgcctggtcaattactgagattgtacgttatatgttttatttctttacattaactgtcaaaaatggggcaccaaaatgcttaatttatttaagatacaatctattttggattttataccccactggtgtaacaagtgaattattaattatttattcatcacttaactgggctcaatctaaattttgtgtttggtataaatggactttgattgggtccatgttgacctatatccctgggttaccaatgttatttttacatatggtggctcaaagaaagaaagttatgaaaagtttaagggaaacacataagaaacataattaaatttgcctatataagctatttcagattgccgacaagtctgtatatatctgcgacaaacatatatacaatatatatctatatgtaaatttgttatcaccttgggtgaatatagtataactcttgaataaaccaacaaatggatgagtacacatctggtgaattacacgcatacataagcatgtagcaatttctagttttaattgtaatcattatctaaactatttttttttgtttcaaggatttcttctgttaaaaaaaaatacagggaaaaagaagtatatacacacaaaaaaaagaagaataaagaagggaaagaagaagaagaagaaactatttaggttatcgataaggttagcaatctcaagttttactatagtatcagatttagatgcttctcattaaagctacaaatacgaatttgtgagaaaaaaatagttatatatttatttgataagcttggaaataagcaaaggaaaaaaaaatagataagagagctgaaaagattaaatgattatgttgaagacattatttagaccaataactgcaaccagattaaataatttatttgtcaaaccacaaagaaatactctattatctcttatgaatataaatgtgggtagtaatagaaaacattattctactgaattaaagaatgaacaagagaataatacaagtacatcacagtcacccattgacataacacctctaaaattagctactgatttatatgctgtgtttagaatacataaccgtccttatttagtcactgaaggtgataaagttattttaccatttaaaatgaaacaagccgaagttggtgatattttaagactaacagatgttataactttaggatcacgtaatttcacattaaaggataatccaatagatccaagtttgtataatttgaaagccactgtcattgaaaagaccaaacgtaaatttgaaatcagagaagtgacaaagagacggaatagaagagttcgtcatgcaaaaagaaaaggtgacttgaccattttaagaattagtaaattggaagttgtttaagtgaaaatttcatataatatactaatcagtattgcctttttcaatcacaaatccatgtaaatattataaaatttgtacaaaatagtccgcctatatctatataaaaaaaataaatagtacacattttattcatctttttttattcaatttattcttcttgttttcaaactgatatatatatatattcaatgcttaaacaggttcaacgacagaaaattataaattagaagaaagaagaatgtattacaccaacacgaaaaaatgttggttatcagataatgtcctgggtttttccagtagctatagtggtttggaattaaggtttgtagaaaatattatgcagttatttaattcagattaactttacatatataaactccgactcaaaaaactacgccaagatcattcaataatgacttgtttgctatatgttctcattactttattataattccattagaagattatttagatcacctgtttgagattagcaattttatatcttcttttcttttaaagagagtaacaatattaataataataacaaccaacaataaatattataaaaaccaaattaggtagcataacaacactacttttgttagtatagttttctctctctagtctacatactttagactagagaaatcttcgattttctctaaaaattacattagacatgcaaagtaggcctgattttgtttctcgaggaatctcatatatcttgtgtaacctattgttctttgtttgtttttcgttttgttttgttttggtctgaaggaaacacgcaaacaaaatagaaacgcagaatagaggaaagaataaaagacatcgattctgcgacatgatgatggatcaacttccctatttttgaggatatatttggtacatttattcttttctaattatcttattctataaataaatttctagctacaatattcattaattttttattcgaccatttattccacaactctctaaacaaacatctgaagaaaagaggaggacaggcaactattattccattacatcatcctatatcgtttaaaccacaatataactttaaatatatctctttatgtatttatattgtacagaataatacctgtgtttttccacttccctcttttttaccaacactaatgccttttcttagaaaaataacgggtactcatcatagtcatagcagatcaaattctggatcatctttactatcacaaattcaatctgctgaaatttctcctagttcgtctaaaaatagtaactcaattctgtttaattctaataactataataatggtaaaagaattaataatgataaaggatctaatataacgatggaccgtaacagcagcaccactgctcctaatgatgataataaaaatcaagaaatagtaacccaaccaaataatggtagtctacctgttagaaaaaaacaaccacctccacctccaaactcacttgatcatcatcatcaaacaagaaatactacaagaacttcatatatgtctaacatctctggtctatcaagcttaacagaaaatgaagcaaatatgtttcactctgattcaatcacatcctcctcctcttcgtcatcatcgaatatacaatccaactatatacctacttttcatgttaataataacgtaaatataccagggactagtaacgattcttcgtctttaaaaagaccttctgtgtcaggttcatcaactctttctgataatctaactctttacactataggtgatgataataaaaacattaatacatcacctacggcgccatcatatcataatccacttactatatcacacaatgaaaatactggaagtttagttggatccactacctctaactcaaatccaaattctagaaagtcatctgatgggaatagtgtaaacagtctttcgtttgataaattgattctttcatgggatccaactgaccctgaagaatggactatgcagagggttctactgtggttgaagtctcaagaatttcccgatcaatggatatcattctttaaaaaaaatcagttatatggtaacaaatttattcgattattagcatatgataatttccaaatgtatgaacgttatttgacaatatcaaagatgggatcgtttactagatttcaagatcttttgaaaaagacaatgactaaaaatgttgataatattcatattatgagacaaaaaaatttggacaaaagtttgacaagtcatagatctttgtcttcaaatctaagaagttcaagtgataatctaagtaaaaatgtacaaaataataccaaatccccattgccagaaaatggattgacgctaacaaaatcagttccttctaaatctcatacaagcaatgattataaatcaaagtcaattccgaagagatatcatcaaaagacattaagtgctagtgcattgtacagaagaagtcttatatcactaagagggtcatccatatctgctggtacatcagccactctttcttctatgccattaaataccaataactacaacagcactgatccaaaaagtccaacaagaggcaataaaatcaaattacatattccacaaaaaccattatcaactttagaagctagtgcaaattcattagtttccaataataatatcttaacacccagtaggtcaaattcatctccattatcccccggaatttttcgtaagaatcataaaagcagttcttctgaatcatctttgttaaatgctatctttggttcgtcatcaaatacccctacaaaccagactaccaataacacaacgccactaaatcatttgaaacatcattctaatcctgaaaatgagaggacaccaggccaaaaacccaataatacatcgacttataatactccacataataataagcatcacttttcaagccatattgcatcaattcaacaacaatataatttaaacaaatatcctagtcaaaaaaaaagacatagtatttcaaacgataatctgataaatgttaaaggtcaaattaatactttaacaggattaaataatggagacgccatctcaagtaacttaaggccaattaaaaacgaagaaaaagagaccttgtgggataaattgaaacgaagaagtcaaattgggttaggttattcaaatagtaccgctaacactcctactacggctaatacattagcaatatctacgtcatcactcaataataataacaagtcaaacacaagtttagtaactttaactacaaataatattgaaaatagcaatacaaacaacacacccaatgtaacttcaaagttaaattcgaattctgatgtaatgtccaaaaagactaattcagagagacacaaagatactacttcttcatttcaaaaaaatgaaaatttagagaagatatcaaagaaggtgaaggagaaaagcacttcactagataacgtcaagagtccttttcaagattattatccaataattaacaataattatcaaggcaactccaaagatatatttatatggatatccaaaaacaatatttcatttgtttctttgaaagtgaatggtataaaagatgtcaatgaacttaaaataacaatccaaagtaagttatcaatacctgctgaccatgatattgctattcatatgactgatttttataataatcttggtcctcctattcccaataaggtattagaagcaataaatattgatggttttgaacaatctacaatgaaattttatattaaggaacaaataaagacaacaagtagacctagaactgctacattatccaatgaaccgaatcaacaattgagatctgtcagaagtagaaattctgtaagatcagtagcaagtagtatagtgacagatgatgtatctattgttacatcatcgtcagatgttacatcatttgatgatccgtctggaggaactggaagacgttacccacaaacaccaagtatatattatgacgcctccacttcgaataaaagtacagaagaagaactgaattattggaatatcaaggaccaacttccttctgagaatatccaaaaacagttactacaaaattctgcagctatcaatactggaaaaattgattctacaattaataaatctaaaaatacaactcctagaaaaaattcaaagagttccttccatgtactcatgaaaaatgatacaaacgaaattaattttaacaaaagaagagaatcaccatatgtgataccagaattagctcctaaaagggaagctccaaaagcacctgcaaatatttcgcctccaagaacattatctcattataaatctgcaccacatcttagaagaacaacaacaaaaatacacagaaaacctgtttcaccttcaactagcaaattggtcggatcttttatgcctggatctactcaagttatggttccacaaccctataagggtgctactgactttgaaagaaaaataaaatcagaagacgaagacatagtgttaaatcctgtatccaattttatgttgaagcagagactggatagatctaattcacattcatcaataaaccatccacttattaataatacaccaccatttttgaagagaggtgtctccaaacgaattgtatcatcagcgtctgcagctgatgtatttgaggaaaacgatataacatttgctgatgctcctgctttatccgacacggacaatgacgatacctcttctgatgatattatatggtcgaataataagaaacaatcagaagacattacttcaacagttaataatattgtatctagtacagacaataaagatatcaaacattcagtattatcagatatattccaaaaagaagaagaaaattatttatcagacgataatttggaaaagagtaatggtctatctcgtaagatgacattaaggccatctccagaagaggtttacgaaaatctagaaaaattcttcccccctgcttatttagataaaccaatcttggaaaatttaatagcacccacttctccaaattctaatgctcaacattcttcagtatcttcaaaacaaaaaaacacagatgatgcagttattcctgtagatatttcataccataagcatttacctaagagaacaaggactatcagagctattgccaatgaagcaaaccaagccagaaagaattccatgaaattaaaaagacataatactaaaatgtggggtaccagaatggtagaaatcacagaaaagcaattggtatcaattaacaaaagtaaaaattctaaaggtgagtaccgagaatttgcatggatgaagggggaaatgataggaaagggttcatttggagctgtctatttatgtttaaatctgacaacaggtgaaatgatggcagtgaaacaagttgaagttcctcaatatagttctcatgatcaaaatataattgatatggtagaagcattgaaatctgaagtgaatactttgaaggatttagatcatttaaatattgtccaatatctgggatttgaagaaaaaaaccatatttatagcttgtttttggaatatgttgctggtggttcagtaggttcattaatacgcctgtatggccgttttgatgaaagtttgattcgacatttgactgttcaggtattaaggggtttggcatatcttcattctaaaggtattttgcatagagatatgaaagctgataatttacttctagaccaagatggtatttgtaaaataagtgattttggtatttctagaaagtcaaacgatatttattctaattctgacatgacaatgaggggtactgttttttggatggccccagaaatggtagatacaaaacaaggttatagtgcgaaagtcgacatatggtcactaggatgtgtggtgctagaaatgtttgctgggaagcgtccatggtccaatttggaagtggtagcagctatgttcaaaattgggaaatctaagtctgcgccacctattcctgaagatactttgccactggtttcacaagatggaagaaatttcttggattcttgttttgaaattaatccagatttacgtccaacagctgacaaactgttgtctcatccttttagtaaagtttatgagtcttttgacttcaaacaaacaaaattagcaaattttattagatctaatgacattttgaactcctctaagttaagagctacttctcaggaaggtttaaagaaagatatataaataaacagttatataattgtattaataacttacttttaaaaggaatatagatatactaacagatagttacaaatttgaatccctaaccaagaaatttatcattaagagaactataatgatgtgtaattagaatattgaatcttttgttggcaccctctaatataatatccttcacctcatctgagaagggattacctcccacaaagtaacgttctgcaattataaatgtggcttcttccagcatgtcttctttttcagttaaccttatattctccaaaacgcatttgataaaacattcacaggatatgtcactctcatttttcacgttaggatttattaaaataatatcaatagaggatatttcaaaccaagactgatcttcaaatacagagcataaattatcaataaaatgactatttttttcattaatgaaaattgatgttttaatgttgtattgattctttctacctctataatttattaaaaggaataaatatatagctagtaaatccgatgatgtgatattagggttttgtaaaagcaaatagaaattttttgttttaaatctgtcaacatttagacgatcactattatttgaaataagaaataaaatattagacttcaattcagttaattgtgagaaataattagacggaagttcatttgaacctaatatatgagaaaaaatatggtcaaacgacttatatctatcatcatttaaaacagaagaatcctttgattgataagatgctccttttaaggggaaaaacactaaactagattcgataagagataatgtgtttatatttatagccttctctttcattgttgagaatataacttcacttgaaaatggcactttagctagtcttgcaaacatgaaaaatatttgtaataatgaatctgaatttgcagtaaaatgtagatcatcattgtataaagttgaagattgtaacagatcagttgttctttcggttaataatctcaaatggatagcttttaatggtaaacattgttcaaaaatgcaatgattttcttcaataactgtaagagttgaaatagaatcttcagtactatgggtcaaacttttagttaatcttttgaatctagggaatactttactactagaagaattgctattcttggttaaattaatattatttagtgggactgatacagggttatgttgattgtttcccaatgtaaaataatttaacatttccaaacatgctgatatctcttcagaattattaataatagtaacaatttccgatatttgaaatacttttaaatctttatatgtatttaatttatttttactagctgtaatgggtacagttgataaggactgaatagatgatgtttcactttctacatctttcttatttattatatcgtttatttcctttctataatggtcagggtatgcaatcattgtcaatggagtcgtaacaaatgtagataccaaagccattagaataaaaataccgtaaattttctgatttataattcctgagtttaaacctactgttaagacaacaatttctacaatacccttgcatgacattaatataccaacagcaagtgactctcgacaaaataaaccatttaattttgctactatgcagcctgaaattactttgctagctattgcaatcccaatacaagcaaaaacaaaaccccaatctttaccttcatttaataaagttaaatctacattcaatcccgcaacggcaaaatatattggaattaagattatatttggaatatcttccatgcgttcagctaatttgataacataattgttatctctaggtacaattaatcccgcaataaaagcgccaaaaattgcatgtactccgataatatcagtaaagtacgctgagacaaacatgataaatagaatacacattgttgcaaatggtgaaggtcttgatctatctaattcatgtgtctttataagtgcccattttaaaatatatctaactggataaaaatatattaagaaccatccaaatgtacataataaaatataaactgtattgaccggatttgattcagaatttgataggataatacttaaagccaataagatccaacctaatatatcattaataataccagcacctagtactatgataccagctctatcttttatgagtcttaattcattcagtattctacataacacgggaaaggcagttactgacattgaaacggcaataaagatcataaagactgtgaattttattgttcttccatttggatctttatttgcataattatgaaataaaggtatagaaattaaacacccacatccaaaagggacagctaatgttgccaagccaatagttacagcagttttgatatttttctttataaattgtaaatcaacttccaagcctaaaaagaacataaataagatgatccctaagtttgcagttaaacttaaccctggaatagatgatttagggaagacagtgtttgtataattctgtatttggccaaatacagttggacccaatatgacccctgcaattacctctgagataactttaggttgacgtattctcgcaaatatcaggtgtaaaaggttacacattgctaatattaagcatacttggaataagaagagagtaactggcgatcctgcattatattcaaaagggttcacacctgaaagtacaccccccactgatatagccatttgtaattgtgcaaaaaaagtatgaacaatcaaaagaacgtatcaaataaaactataagtaaccaaaaatattaagtaaacgataaatatgcgtttggttacagcgatactctactatgtgtatgttatcaacaatatatgttttgaaaaaatatttttgtttctgttttactagtaattgttgtacttattttcttacttgttgttaatatatgtttaagtcataatatccttgatccacatatatttatacaagcaaatgacgaaggaaaaatatatgtatatacacataacaagtgtatatttctgttactttcaacactcttttccttatgaacaactttaaaagaaatatcaataagcattagttattattattttatagaaggaactttaaaatgagaaaaaagaaacaaactaagaatgcaagaataaggaaacgaaataaaaaaaaaaaaaaaaaaaaaaaagagagagagagagagatactctaggtattaataataaaaagcaaagaatattattctatttcttataaaatggcaaatatatgttacaaattgtcatagacatggatgtaaatgggtggtaactaatgcaaattaattaaaatagtactctttctatggtaaatattgtatgatgaaactaaaaagtgttcatttgcaccactacctataacatacatagaaaaatggtgtttttttttcaacaacttttattaatagttgactcattttttctgcgagacattgtatgtaatgaggatgatgatgaaattgtagtagaagcgttttcattaaagcgattcgatgcattcgaagaagtagttttttccaaaattgtggatgcattttgttgttcagtcataatgtcatccataagtttatcaattgcatcagatattcttaaaaatgcaaaatgtggttcatttagtgggaattttaatggtgttctattagatatccaaaaattgtcattttcctgttttgtgagcatcaattcttcagttggatatagattatgaagattagtccactgttgaaaacttaatttgtaactattattttctaatgatatcctatgtaaaatccttagagacttaaacaaatgtttcaatctttgtaatttcttaaattcgagcttgggtctattacttacggtctttgttaaagattctacggattctgaatcctcgtcatctaaggacgggacaatgtcaaaatctgtatcatcagagtccgaaatagaatctagatcagtaaatatattattttgtttaacgtcccacgatttatttaagatatcgtctaatgtacatatagaacgagaatcgtgatttctatttttacaagaactactttgttcaaaattactataattatgatcattatcattataattatctccgtcgttttggttaatcttatttttatgtccattattctttttagcttccttgatcatgttatgtttacttttaactaattcttcaataatttcaccatttggaattttaaatgatactggatataaactcttagatattttgattgtatcaaatccaatgtggaaacgtttagacaattgaatgtctaatttattagacaaagtaaacaacaaatcaccagctgtggaaatcaaagcactcatcagggggatagcaccgatcccccatatgacaaaaaacgctctacctgcaccagtagaaggtgtaaaatcactaccataaccaatagttaaaagacataaaaaacaaaaatacattgaattaaaaaaagaccaatcttctgcgaaatgaaatactagtgctcccaataaccagaatcctatgaaaatagtcattgtagtcaaaatagaatagattttccctctattataggctccctttgcgattctttccattatttggaaaccttccttgttatctatagttaactccccattcaatactttttcccacagtttagttctacttgattccagtctatggaaataccaaacaggaccagaagatctttgtataattgatcttgtcatataaacaattaacccaaggataaagatcccagataacgaaaagaggagaatcatgattttggaggcaacattaatcgggaagatatcaccaaacccgacggttaatagagatacgacacaaaagtataatgaattaccaaaagatattcccattaaaccagagaacaagccagcaccccatattaaccaaagtgaaagaaagacagtaaaaaccataataattctctcatttggtaagagattgaaagtggcagggtattttttcaacttataaccaataaaatgtattgttaaggtgaaagtgcatgctatatataagccagatgtgaaagaagcataccaaaatcctagtgttcttgcttgtccctcctggatttctgaactgcatataattacatctatcattaacagcagtccagcagcagtccatccgacaatattaatgaactgagatgtgagataactcagtctcctggaaaaatgacataaaagaaccacatttgatgaaaatcctaagactaaagatataacattgatggcaaagatcccctttgggtctaataattgattgctctcagtattatcgtcatgaactccggattttgccgttctagtttgtctccacttttccactacacaagcaatagaaatagtattagcgataggacccaaacatgcagttataacagggaaatagcacgagacaaaaaaccaaaatacgaatgattttttagtggggtcatcattaattatactgattctgttatttttgaatttgagagaatctctaacagcaaaattcagagcatggatctcatgtttgtgtctcattcgttgttgagattcaacgtcactcataatttcatatttctctatatgcttttgtttgtgtgttgtatctgtgttatgtggtgttacttggtattacgtggtgttatccagagttaatatgatacgattttttcctatttaatttattttaaattaatttgattttgatgctttcttcaatataaataaattgtcttatacaggtatattttgataattcagatctcttctctttattaactgaaccttctcatcttctatttccattgatcttgtactatttttgtaggcaggagagaatgggagaagagtgaaaagaaaaaaaatgggaaaaaaaaatatggggggggggggagaaatgaaaaactggaaagaatgaaaaaacgatgcgggttcgatcgctgtggtctgcgtaatttcaaataggattgtagatagataaaagagtcttccaaaaatgcgttttaccacttctcactgtgtctagtatgcttcgatggctttctttccaattgtaatctacagggggaagggcagagagaggaatgtggaggaagagaaaggtttatttatttggcagtataatgaatcttaataataacaacagggtttcttatgaaatgtttgcgcctcccattacaaagttgtagtttatagttctttcttctcatctcttgtatctgcacaactattgttttagtgtgtatggagtaagtattaataataataataataataataataatgataataataataatgtatggaaatgtgcgtcaaggaagaatcgaaggaaggaaaatcaaagaaaaataaatttcaagaaaaaaaaaaaagaaaggaaaaataaaaggaaaaaaaataaaaagcaataatcattttggcgttttgtttcaacttacaatatcatcgtgttgtactgatagtatacacgaactcattcaattgatattagcaattcattatctaagtgcaaacatatgctgatatcccttttatcttttctcgttttcactagctccaatcaataaaaccatttttctgttctttggtttctttttattttgtgttgttgccttttttttttgttttttaataatttgtcaaaatacatcatcttatatatcgatctattagtttatctattcaatacctttgtatatgtgcgttataaagtatgaccacaaatgatgattttaatcaatatgatagaacattaagaggcatattatctactttaaataaacagcaactattagccaccaaattcaatccaactaaagctctacaagtgatcgctggtcctggtacaggcaaaacaaaagttttgacctcaagggttgcttatttactgttacgtcataacataaagccaaatgaaattatcgtgacaactttcacaaataaagccgcaaaggaaatgatagaaagactgcaaagtctatttaaaggtacagatattgatttgaaaaatctattcattggtactttccatgggatctgtttaaagattttaggtaggttcggttataaaattggattgcagaatggttggaggattattgaagaaagagaaatcgataatataattaatgaaattataaacaatgtacctgatcagatcagagattatgcaaattcttttaaaagattgattaatctttgtagacccaataaatctggcgacagttggacattaaattgtcaaatgattaaaagagagatttccaaattgaaagcaaacgcaatgattccagaagaatataataacgaacaagagcatgactctgcattagcttatttctaccaaaagtatcaagataaattacatgaattgaatgttttggatttcgatgatcttttaatgtactgtttccgtcttctaactaaagaacgttgtctacctaacattaaacatgtttttgtggatgaattccaagatacaaacagtatccaaatggatttaatgtttttaatggcaagaggtgatcatcatatctcaagaggtataacagttgtgggtgatcctgaccaaagtatttactcctttagaaacgcattagaccaaaattttcaagaaatggtgaataaatctccaatcccatgttctcagattgttttaattgaaaattataggtcaacacaaaagatcttaaatacaagtgagattttgattcaacaacaattaaaaggtagaactctgagagctcccttgcatgcacaattcgattgtgattttccaccggtttatataaatttccctgttctttttttacaaggtccatctttggctaaagaactattatatttaaaggctttaccgaatttgttcacttttgatgactttgcaatcttagttagacaacgcagacaaattaaaagtattgagtcttcattgattgaacatagaattccgtataaaataattagaggtagagctttttgggaattgaaagaaattacatccatgttgaatcttcttcgttgtcttctatcagataatgataaaagcgcaattttacaatctttaatctacccgtcaaggggtcttggacagacaacattagaaaaaatcgggattaaaatggatgaaatgagtcaaagaaaaaatctcaatccattaatgacactgagaaagatcaattctaatcaaataccattcagtatgactacaaagatacgatctgtgatttccaattttcttacaatgatcgatagttgtagaactaatatagaagctaaggtgactgagcccatgttagacaagctgtttgataaaatgtatcaggattcaggactagagaaagaatatttatatgaggattgtactaataataaaaagaaattaccaagtgatacagtgaaaacaatatcagctaactatggaaatgtaagacataaaaatgtcgggatacttaaaagatatttccttggaatcacacagattgaaagtgacaatgtaccatccgatgataaattagaagcttcgacaataagtggtgtttgtttagatgacatcactcttcgtgaatatatcgccaggttttttaattcaatatcaatctttaatgcagcaaatgaggatttgcaatataatgaaaaggaaacacagggaagagttactatatccacaattcatggctcaaaaggtttagagtggcctgtggtttttattcctggttgtgttgaagggattataccaagcatattctccagggatggtgaggagaatggtgatgacgaaaatactggtaataatactagtgatgataaaggtgatatgaaagaaggtgatgacctaagcaattcttcaaatggattcaataatggcaccaaacgtcccaaaaacatcgatgtcactttagatgaagaacgtagaatgttttttgtggcgcaaacaagggcaaaagtactattatatctttcttctatagatgaaaatgaaggcaatccaatgttagggggaccaagtcgttttttgacgccaaatttacttgctacattggttgatgatcaaaaagtatttgcagatattaaaaatattaaatcattataccatgcaatgaagaaaccacttcctgggagaaatattagtgagatattctcgtttaagacattacttcaagattatgccgattttatttcaaataggcgtgaaaaaatggtatggggtggtcaacaaatttcaaatattcaaatgttacgtttagaaaggaataggctcggtacatcaagtgctcttctatcagattttagtacagctgcagatcagttaaaaattgaaacacaacttagtgggactaaaaatcaatatgcctctacacataagaaaagcaaacagtcagtaataaacaatatacaaatgagtcctcaaagaacatatgcaccaacgtccggcattaaaagatcatctagtccaaggaaaatctttgctccgtctattgatgatagagtatcaccaattaaaaagaaacaatatacagggaaagatgaaagtgtacaacaacgaagtctagtagataataatattgataatatttctgttgagaagccttctataagtagtagcaaaccattgtttcctttaaagaaagagaactcctttgaatatttgaagcctgttaaaatagaggatataacagcatcggaaattctacataatcctgaggatttgactgttgatgatagacctatagttgccaatgctaaactgcttgcagacgccattattaataaaaagaaaaatcctagtgaagtgctaattaagaaagaagtggggcaggagcttcaggacaaaactctaaaagctaagactaaaaaagataaaccttcgaaaacaaagagatcatcaattcctcaattcaaaaagaagaatgagaaaacggatattacaagagaagcatcatctagtcaatttgatatcttctcgcaattatcaagggctaggaaaaaacccaaaattaaagacaatgaaattattatcatagatgattaatcaggtaattactcagagataaaataaaataaaaaaataaacaaataaataaaaaatttactaatattctttaatgtcatataatctatatagaaatacaataacaataaaaatgatatgcatattatttctaagacaacagaatttctatcttgtttatttgtttgttttttttggtataatttgaatttacaagttctatatgatattttatagccgaataaatatctttttaatatatagcaacactgccacaaatgcaatgaatgctgcatacgtgatcaaagtagagattgctaacaagtcagacatatctaatgtggaaacagacatgttaatgagacctgtggtaacgttagccaaaagaaataagataaggccgttagtattcatagcttctatacataacgatgttggttgactcatatctgttgaattgttaaatattttatcaatggcacaatagatggccaaatatccagtgttgaaacttacaatccacaaggtgtaaggcaaattagcgaatcttctagatatatcttgtggatgcactagaagaatgaattttgtcatcagagcggtaatacagaaccaaaaaatcaaaccctttaatggctttactgtggtcattctatcccatctactgattgaacgggtctcctttgtatttagtggaacaatggatgctttataaagattattcttggtagggatattacccaataaatagcatcctgtgctttgaccccaaagaaaaattgagcaatagccaataaaggacacaagaccttctctgttagcgtcaatgatgttttctctagaagatagaatcaaatagtttataaagatattatccttaactaagaaccattcgtagatcccagatatcaccaaggctattaaaaatcttgggatatagtcagcaattgggtctatgataactaatactaagggcaatagagaaagagtcatgaaaaaattccaatggacaccgtattctgtcacatgttcttgatactctaagtttttaacgaaatataatcttaaaaggcctaaaaacaataaagtgtggcatgatttaagtgcattaaatacacgtttgtggaatgagattcttctggttgatttcaaagaggaacgagcatagaccaacccgttactgaaaacaaaggaacctacccccaagtccattaatgaagtgccccatgtttccactttagcaaatctacgtgggaagattgggaaatcgactgctaaaatagcaagacatgtcaaaatcaacatgtgtgatctataagttgtgatatatgattttttgactaaactgaaagttgtttgattgagtttagagatattttttgaaggtagtttgttaactctatttttggtagaagtatagtatgctttaccgaaaatacagacaataagacaaggaacaatcatgaacgtaatcaacaaactaatattactagagtatagagtcatcgaaaacagcaaacaaacccaattaagtgaaaaatccacaaatggattaatatgattatcaggagacactttgttcaaaatttttatacatatataactgaagactgtcacagaggacactaaattgacttcttggattgaactaccatgtaaaccggtgacaaaattttcttttctttctttcaaagtggacatatagatatatattgtatcaatgtgtgaaagaggatttgattagtttaatacctctatggttattattatacaaaaaaaaagtcttatctatattcccaaatgataaaattcgatatatacttatatatatttattgacaaaagtgaaattattaagtaattattgtatatttattcacttacgtgttcaatttctttattttcatgtgttattttttctttgacattagggtttggtgtgtgtgtttttctctcattccctgtaccaataatgacaatagggcatattatttgaatcaggtgttttttacattttcctttaaaaataaaataatattttagggttaaaagaaattagaaaggaaaaaaacaaaaagaggtgagcaagaaaaaaaaaaaaaagaacaagaattctaaaaacaacgaaggggaaagaagtaaagtcataagggaaaagccaaatgaagttttctatacaaaagtctgtgatgttatatgcacaaaaaaacagaagagacttgttcaatgtgtccgtaagtatatgtgaaattggcagagccggtgttatcccctcctattgccaacaaatcatataagacatatacacatgtatatgcatatgcattaaatatacacataaatatatattgttagacacaagatatgattgccaataaagtattgtttaaaggtgtattggaaccatcacgctaccaagacccaagaacttataagatgacaccagccatgattagagccaggaaacctttctttgtacgtaacatgattggactgactttcttcgttggtttgactggtggtatatattactatacttacaatttcttacataaagataatgattttgatgatgtgccaattccaccaattgatgaagaagaattgaaacaattacaaaaagaatatgagttaagaaaaaataaatcaaaataattaatcacattaccaaattgattatccatcgactgaaatatacgtaatatacgaatgtatccgtacacatttcacatacctcgcctacttaatcatattaatgtatatgtatatttatgtggtggtggttttttttttcttatttttttcattttttttttttattttcattttgtttagttttcttcctattcttttatcttttttttttgtaaatagattttaatccactaatatatttgttactgtttgttattatcgctgtttctttcttcaagctacatgggtatatatatcttcgtagatgggcttatatatacatgtttggtatatttacatcacatatattagattttttttggaaaaaaaaaaatatatatatatatatataagaaaagaaagtaaaacaaaaaaaatagctgggcaaatatgaagttttctggtcatttcccattggaagatcaagtggttctgattacaggtggatctcaagggctaggtaagcaatttgcttataaatatttcaatgaaactgaaagaactaaaattattttagtcagtagatcagacaataaattgtataacgttgttagagatattgaatcaaatcaaacaaaaccacaagctgagataaacaataatgaaccaatttgtctattaaatgaatacccagatgatctatttttgaatagacgaattttttatttaccttgtgatctatctgattttaaagaagtggataaattgtttggtactctattagaacatcgtctatatccaactgttattttgaactgtgttggtggttcaatacctaaacattttaaagacctaacacccgaggaattagaactaggtattgatcagaattataaaagtgttttgactttatcacatactttattaaataaatttaatcaattatcaaattcacataaatctttcagtaacagcacatcatcatcatcaacaacaacaacagtagcaaaaacagcagaagtgacctataaatgccatctagtcttgttttcaagtgaagtctgttttttcccatttattgggtatagtcaatatgcaccattaaaagtagctatgaaatctttaattaatatattaagacaagaactctgttcatctgaatataatgataatatcaaattgtcttgtgtttacccaggaaatttcaaaagtgaggggtttgaactagaagaattgacaaaacctaaaattaccaagattattgaaggtccatcctatccaatttcatgcattgaatgttgtaataaaattgtttattggttagatatgggctataatgatgttactacagatttcatcgggtgggttttgatgtctgttgacatgggactgaataaaaataataataagtcgtttctatactggttacaactgttaattggtggtctagctaatctattgattgtaccgatttacatgattatatgtcaatggcaaattaaatcttattttaaagaatcaaacaaaaatggtgatgatagacaaaagcaagaataataagtcgtcattttacctttcttcctttctttcttccgcctcatccttctccttcatttctttctgtataataatcaaatctttatctttattatcatgtaatattttgtatattatacaacatacttactcatcaatattactcattgcattttttgttttgtgaaaaaaaaaaaattaaaaaaaaaactatcaaagaaagtgtagaactattttttcttatgaaatttcttctgatattttcaaataaataaataagctacactttcattttaacaatcatattatatatagctgtaaatgatttatatcaagcaatatcaatcgatactgttcacagttaatagtattatttaatttgtgtgtctaatcatgttccaattttgtttggaatatcttgaattatttgtttaatattgttttgaaatgtattattcataaaaaaaaaattcatatattttattaattcttcttcgtaacaaaatgttgtacgtccattgaaagctgtaagaagatgatttgtcatcattgtagtaccatcgttcatttgctagcataaaagatttaaatagtaagtcattttattcttgtatgcattttatctagacagattttagataagacatgctgtaattttacggtttctggaatcttatatatacgatctttctttgagccttttaaagtttgttgtacttcatttattttatttttttttgtttataatgatgataagatatatgaagtcaaaattgtaggatgcaatggcttttgtcgtaataacaaggtatttgctaaggaatttccatttttcggctgtagtagaaatttgtttctttttgagttaacttttacatttcattccttataaattggggattttcagactaaatataaaaatcaactttagaaaacttttttttttttcgaaaaaccataaacacaaaaaagaatgccagactttttatgaaaagtcaataaatattacttaataatataaattgtgttaatttgattcttgtattgataataagacaaaagtaaactggtgacaaattacctgttctcaatgctttaagtcaaaatatgtgaattcattccacggaaccgatctctaaaagtgaaacctgttcccgcggcaaaacaacaaattctttttttatttttttatttttttatgtgttagggtttcgactttccatttgggaaaacattggtaaaccctcatcttggcattttttattcttttataattctgttttttttttggtggtgggacaatagaaagaggaaaaaaataaaaaaaaagtcaaaaaaaagcaagagaattctgcgatgagttttacaacaaagaaattaaatgtgaataaaaaaaaagaaaaattgaattataagaagatccaattgtgttaagagacgtacaatataaaataacagatcacacacacatatatatcttgatagtatatagaatattccacccatcgatataccactacctattagaaacaatgtatacttgtaatacatgctgtttagaattcgaaaccagtgatcttcaaagaaatcacatgaaatgtgattggcatcgttataatctgaaaagaaaagttgcgcagttgccacctgtcagtgaatctgtgttcaatgataagatgcaacaaatgatatcaagtaatcaaacaaacaacactacttctaaaaattcgagtggtgatgcaaaactgtctaaaagagaacagaaaaggaaggaaaaggaagccttgctgaaaaaaaaaagacaattattagaaacggcaagacaaaatatattgaaagccattgaagaacaacaaaagcaagcagaattgaataatgtgatgactgtggaagagcctattccaatagcaaatattataaaggatcaacaaatggaaatagaaatgaaagaagaaaaaggagaagaagaagaaaaagaagaattaactcctgatcaactagctgaaaaattgatgaaagaaaaaattgcaaataaagtagagattccaattaacgtatgcttattctgtaatcataaccaaagagaaaaacatctgtccacattcaaagatatggatgcaaatatagatcatatgtttagatgccatgggttttatattccagaacagaagtatttggttgacaaagaaggattaataaaatatatggcagaaaagattggtctcggtaacgtctgtttagtttgttcttatcaaggtaaaaatttagaagctgttagaaatcatatgctagccaaaagacattgtaagatcccgtatgaaacattaaatgaaaaactagagatatcagagttctatgatttcaccagtacatactccaattattcaaagaaatcaaatgataaagaaactactgtaactattaatgctaataatattcctagtaatagtgaagggaatgataacgaagatgaatgggaagacatatcttctgatgacgaggaagtagaagacaagaatgaaggagaagaagaagcagaggaagatatcccagaagaatacttgtataatgatggtatggccttacatctgccaacaggtataaaagttggtcatagatcgttacaacgttatttcaaccaatctttaaaacccgaaaagatattaacagaaggccaaggtactttggtggctgcagacacaagatccttcgttactgggtttgataagaaaattgttcaaacacaacaaagggtctggcagagtgaagttaatgataagaagagaaatgaaaaacggtcagctaaattcattaatcatcaaccccattacagagatcaattattacaataaagtataccaattatacccgtgcattgtttcactgtgctttgtataaagatatatactattcattccttcttcaagtgtatattaatcgataaattttttacatcattatttgcttcatattacgtctacacaatcagatgaactagatggccccagtccaaacttcacatatggtaaactggtgtctattgttattgcaaattatccatcaataatacgtccttgaaacatttagtaaactttcgaatgaaagaaacgtggaatatagaaatgaaaaaaaaaaataaaaaaatatataagaaaaaaaaataataagaagataaaatactgtagacatgagaaaagtagagaaataaaaatgatactcataagataaaaacaaaaggagattttcaatcaatcttcaacttctatattacttattagttagtcaaaactatagcattaacggctgttgttttatcccttctaactccaacttttcatattctatttttttttacttttgcatccctgtttcccttatcctataacctcaagtagcatccaacgagagactatcttttttttctcttttcattcgttcatttggatatttattaattttataatgttaagagttcactgtaatagtagaagacttttgaccacctcaacaagattattaaatgtcaaactaacagagactgtaaatacaagcacaacatcaaatactatcaatgaaataaaaggcaaatcttcttgtccaatgggtactaaattaaatttagatatctggaaggatccgaagagggatccagtagctaaagcagataatgaatatccagattggttatggaatataattccatctgatcattctaaagggacaaagagtcaagatgacccatttgttaaaagagctaaagaattaaggaaattacatagaaatcaaatcaagcaaaataattacctaagtaagttgaaatagtttattattattacatttgctcacttcctttattttatttgtttcgtatttatcttatcctttaacttagtcggtataaactacaatgaggatgtgacagacatttcaccatcattagttgtaaccaagaaaaagagatgattcgaaaaagaatatttatattttgaatagtgtactcaactaacttcatactttaatcattatatacagatatatatcattatcattcttaacaaactttatgcattatatagagcatagaacttttatccaagatgataatggcaaccatgtaaatatattaataatattatcaatcaaaaactatacgaataataaaaatacaagaagaaatccgtgtgaatttgtaaatagatatgaataggtataataggaaatggttaatatcaatccacttttatttatttattgtttttttttttaaatcttttctttggctctctcttactgaattattaaaaatcagtgaccctaccattgaaagaccaatccccatgccttagtggatcttgctttggaccaccgacttcacctgtctttggattcacatcaccctcaaattctggaatcgtcttagtgtattctggtgatattctaccaatatcatttttatcttttagcgactttcttaaagcttctaaactctctttattaccagggctccccaatccaatattttcattgccactattactagtaccatttaatacagctttgttatattctctaattgtatcttctgcattggctatcttttgcaatttttcaaattcttcttgttctttctttggtaatttaggtggagatggtgtctctttaccatagtttatttgccttgataaaatcaaattctgtcttctcagtgatattagtttactaaaattaatgaccctgactgttaatcttgcacgtaacatttgtacttcgctagacaagaaacaatttcaatgttttatgaatattaaaatcggataaaccgttgtcctctgtattatttttattaagtgtaatggacagatcaactttcctacacgtctaaagattcgctagcagaaagccaacagacaagtatttccaactatgggaaatggcactgatgagtatatatacatttcacagattaaaagaaaggaaggggtaatcctcatagtggaccattatacttcatataaagaaaaaattgattacgaaagtttaaaaaagaaaaaaagaaaaagaaatctcactatttttgtgtaaaatattatgtattacgctgaatgaaatcatataacccccacacatatatacatatatctacatatctatatacgtttacaggagtgtaatctttcaaatactcattctaacaccctctaataaatcttcaatgatttgttgattcccatctttaccttgaatggtacttagtatccctaaacattgtaataatatcagtttatcttcttctgtaacaccactctcctcttcttcattcagaatataagtgtaaaaactttttgataccccttcatcactatggatgaaattttgataatatggtaggacgatcgaatctctaaaacatctcaacaacatatcttcaatagaaaatttcccgttgatgcctacattgacactattaccattaatattactactactattataattattaatattaacattaatatttggaatagaagttgctgtgttaatgctataattattattcttatcattattgctactgccactaccactgccactaccattattactattattgctataattgttattcccatttacatttaagttaccattactacggttaactttgttaaaatcaatattcaagtctaaaaacatattattacccatttgtgtaatcaaattgcttgatgatgaatttacactagttggagtaattgcacttaatgcattgctattataatcactattttttttcatactagtatcatcactatctagtcttctcaaaccaataatctcaggggcaagataatcgtcaaggctttgcacttcattattctcattgttatcattgacattacgctcatgtttatcattattataatcataactcttgcttctatttgagatatgcaaactagagttgttttcattttttctttttgttaaacttaatctatttcgtttgtaaacatcatttaattttatttgattttgataatctgtctctaatggtaaaagtacagcaacaacatcataatatatttcttgataaaatatttgccataaaacacctaatctttttaaagcagtatttattgtatcttcgttactataattaaaaacaacttgattctcaaatacatacaatgaagttacaataaattcttctatttcaaaaatcaacttagcccatgttatagctatctttgatcttgtcttcaatttaatataaaaccttaaaatacgatttaaatcttctatttttgctggtaaatgccatatcctttggttcttgaataattctacgacaacactacaataaattccccagatgttacctgataatatgatcaattcttgagtattgaaatttctataattggctttcaaggatgataaattttttaacaaatcatgtaaaattgctacatttgtagaatccaaaatgtcatcttgttgagtgatagctaatgcagcatcattggtagcattcaaaacacttggattaaatgaatatacggatttccccgagtctattattccacctgtggtgctatgaataaaatgaacaggtgatctatgccttcctatagaagaatgtaaaaatttgcctaacgagtttggtataacaggctctgttgtatctttaagatgctgactgcttttactacggaatattttttttgtaaatttaataaatgggttatttttattagcactattactattactattattgttgttgttgccaccaccactactatgactaatagtagagataagtgacagagtggcgtttgaagtatttcttctcatcgaattacccgtagtacgctccctattagtacgggttttatcaacattaagattatttgaagatatcgtttcttgatcactaagattaattagggaatttgtgattaaagtatcagaattctttctcaactgattattactattggtatcattataagcaatagtaatcttactattactattgttattcctaggtaactgtttatcactatcgtctctgatttttgtcaaactgaatatggaatcccttcttcttttgtaaggttcaacattagtctctacatttgaatgtaatggtgtaaaatcattagtagtatgtcttaaccttaaagaatgcaatggtccaaacgatctcaaagatttatcaaaggaatctgaactttttcttattggttttatatttgtcttcctaacaatattggaagaatcatcaggactatttaatgttttgctattattgttcgtagatgctgtagtgtttgtatcatgcttattagagtgtgttacgggcatagttgtggaatgtgcatttgacgaagcagaagatatagaagatctatccgatgttatactaatattggatttttttgatttgggacctcggaaaatggattgaaatcctacattagaccatttaggtatattatttttgcttgacagatccctgtatttatcattaacatttttattcaatttttgcaagttatcataattacttgaaattacatctttatcaataatactactactagtcaatggtttatttgtgtcaacactgtcatttactgtctctacagtcaaattagatagtgcagatgtagttgtattactaagtctactgttaccacgttctcgcgaaggtttttcacccactattatagtttgagggatgatatcagatgatatactataaactcgtggtttttctttcttgggactaattccaattacacttttatctatagtttcaggtggacttgatgaagagcgtagcttcacactttccccctttcttatagtagtcactggtaattgtgtgtcaactttatgttccaatttagtactcatattgttagtaattgcttgaatatactgatatctgtgtactgtgacgactgccaacaggaactttttcgagaaaatgacactgacgataaattactataacttattgaaaacaaaacaacccttacaatgtctggttcacgtgtctaaataacggtggtctctcaaataatgattcatctcacgttgcttcatttatgtatacattacatctgatatatcttcccttaacatacccacatttctacgtatatcatattgtaaaaagactttatgacttttgggtgccagaatatctcaatttcttcacatttaaagatttgaaaaaataattttagatatgataataaggtaggatgggaacaccaaaaacgtagaatcacaagttgacaacaaattaatgaacaaaatacgcacattcgtaattagtttggtagcgtttatattcttatttctatatctaatcatgaactccctcatattacataaataaacaataaaactatagaatattaaaagaagaaagatatatttattgatcatgttcgacccattagacttatatgatggatctgaaatgaatattgctgcaaacaaatttactatagaatttaacatttctgataacacattatcttctgattataagtatgaggactccagcatgaaaaatattaatgacgatgaagagaacgttccaataacagttttagatttaccatcagtaagatatgctacacccaatataatctttactgttctaaaattattgcgtaatgacaatcagttgaatttcaaaagtgaaactactctgaatgctaacagcaccataattaacaatgatgatgattatgccactactcttacacacacagaattagaagagttttgcttgaaaagagatatagatcaaaaatgtctggaagaaatagttcaatggtacactacaaaatggccaaattctctattgaatacaataacaaagataataactaaaataccgtgtctgaaaacaacggaatcaaaggataaattactaaactattatacctccattcttcgattctttgagcaatatacttctcagaattcaaatgaaacagatctaattgaatcaatattaaaagaggctagcaagagaataagtgaatcctgtggtagaactgcattaccttccatacatcgtaactttcaatttaataatttacaaacaattataaagttatatgaaccatctttaacagcagataatctaggatggaaaacttggggatcttcaatgatcctatcacaaggactagtcgaaaaagacgaaaattttaatattgaatactctaaaggctcatgttctctaagagtacttgaattaggctctgggacaggattagtcggtattgcatgggctactaaatggaaagagttatataaaaacgagaatgctaatattgaaatttttttgacggatctaccagaaattgttgataatttaagacaaaacgttaaggataatgaactcgatggattagttcaagtagatgtattagactggactgatcctagcacatttatagaaaaatatggagataataaatttgacataattttagtggcagatccaatatattcaccagagcatcctaaatgggttgttaatatgattgataaatttatgaaaccaaatggagtgtgccatttacagattcctataagaaaaaaatatgccaaagaaagacaatcattaaataatcttttaaaagatgcaaacctatctatcatagaacaaaaatatgaggaaggctatgacgattggggactagttacatatttatatagaaaaattatacgtggataatacaactatataatattaatcaatgataattgtagatatattcccttcgtaggtgtcacatatccatatcagtttatctctctattatatttttatataaacaattatacgttaaccacatgatagatcttctacacaatcttcttcttttttgtgtagatatattgttcctttcccctttcctgttttttttttttctgattattgactaaaagaacttgcaacaattggttgttctactctatttgtatcgacattattacaaaccttaacatattcagcctttaatggtttataccaaacatttaaaacttcaggggacaattttatcaaagcatctataatttcacttcttaattgtacagtttctggctcttttatatgattatcattattgtcaattaaatttgtcataaccttcggcaattggtaaatcaagtagtttattgaatattcatattttgtcattttctctaaaagaaccatttgctctaaataaggtaatgaaagtattgattctgcgtccaatttattttggattaattcaaatgtactcttacttgaaatcaaatttctaaaaattagtaattgtgttgcagtcaaaacaacataattatctataattgatctgtagaacctgtacaaatagtctggattaataaatgataaataatcattaataaattcattttctattgatacatgtaaatatttttcatctaggtccttaaatatttgcatatctgattcaattgacgaagatggtaaatatgaaacttcttgaaagaatttgaaaactgggatcttggcaaaatatattaaatcagggtattgatctctttgatcaaaaattgaacccattaaaaatataattggttttaaatattctaatagccaataataattctggttattcctaatataagtaaaccattcactataatatttaattatatgcaagaacaataaaatatcgtcatgaaggatttttaatattgtatcattggagaaaataaatatattggaattaaattcattttgtgaatgcatattttctagtaaaatgtttaataaatttaataatctaactgtaggggttggcttcaaatttttcttgattacctctaacaatttatagttattttttaatatgttatctcttattaattgatcagacagtaatctcacccaaattttatcaatctcattaattatactaatcgatatgtcttcattaaaatataaatctaacagaatatcaaatattattgtagaagcaaagattccttttggataggaatttgatataattaaacatgcagattgaattaaaggaactgtaccagattttaatgccatttgtaaatctccaatattgaaaatttttaaaatatcttcaaatgaagtcaaattaatcaaaatatttaaaaattctgataatgtatcataatctaaattttcaattatagaagaagaagaagaaagtgaagaagaaaacagtaacagttttttaatcgataacaatgtctgttcagtagaaaacgggatttttgtcagaacatttaattgtaatgagcattgagtaatggtggtgttcaatttttcaaccaatttattgacatcattggcatttttagaaacaagatttgccactaaatcattaaactttcgaataagttcttcaatctcagtcatctttaaatatatatatatatatacgtaaatatgagctttttgttctagtaattcattatatacttaataatattaagtatttacagttttcttcgtttctccatatcatctatataatctacagattttgcgattctaatccttttatttgtttagttatttctttttttcccttttcctttcgctattttttctatgaactcttcttcttttttttttttttttttttgaaaatatataacatacagaaaatacgatattgaatagtcaactgaagaacattaatgtaagatgctacactatatatcagagagtagatattatttggaaggttatcactaataacaatgataatatgtttgttagttatgtctacaattccattagtttattattgctgttgtgactaatggaagagaaagaatctatgctatttgaatcaaccaaaatatagtccatcttttctctatcaatacatttaatatagtcccatacaattctaactaatagatatatttttattggtagaaaagacacaatatatctccatttattatattgactattgttactatcataattattctctctaaccagaattaaagattcattattgaattttatatttaataaatccaactttactaattcatcttcaagcatattgtatctatgatatggtggatatctttgcacaaatttatattgactaaacggcaatttctgttttatggatgattgtaaccattgcctgatatcctgcaaagtatcgtttttaagatcaaaattgtgtacaaacgtgttttgatctaatgcttcaactataacaattttcattttatcttattttttacttgtcgactttttttaactctcacacatttacatatgaaggaatattattactactagtattatttcttttgtctttttgtggtactctggttggtaatataatctaaactatctactgtcaaatatatctaccaccataaatagaacaatttgtagccatgcctattggaacacacacataaatacatacatgcatatatatatttatatatatacatattatgtattatacatataatatgtaagctcttttctttgtttatttcactgtggatgtcagggatggagaaacccgtaaattccgatagcaatgcttgtgagggatttttttccctttatttggcagtacaataggagaccgaaaaaattaatacaatacaaaacaaaagatctccagttgctttttgttttcttcagcagatcttacagcaatgcatgtatggcaatgatattctttgtttatttaacctttacgacaatacatcctgcttgataacaaagactgttaccaaacctacgaaatacgacacatacacagatacatatatatgtctaaatatacttggtaagtagagatgcgtagtttttatctattttttctttgtttgtcttaagaaactttaaacacaataaaatgcgatcaaaatctgatctcatcgctttttttttctcgaggaaaagactgaaagtcacttggaaaaaatatagaaaagtaaacaacaacgacaacaccaaattaatatatatgcatacatctatacatgtcaataattagtggtcaaggacacttggatattattacataacatataatctccatataaactaacacaattttatttttgcttttttccttcattttttttgtgtacttgactccccatggatggtgacatcattccaagtcagataattgaagaccaagatatcatacctcagattgatggatttacattaggtgagactttaggacaaggatcctttggaataataaaatctgcatctttaaaagatgataatattgacaataatgaatcttccacagttgtcgcaatcaaatttattgatttgattaagtgtaaacaaaacggtatcaaagacaagaaaatatataaggaagtcctgctacattcaaaatgttccaatcatccaaatatcttaaaactcttggattataatatcaaaaatgactacctttatttgatcttggagatggctgatggaggtgacctttttgataaaattgaaccagatataggcgtagataacgatgtagcacaattttatttccaacaactaattaatgcaatatctttcttacacaataatcatggtattgcacatagagacatcaaacctgaaaatattttgttggataggtatggtaatttaaaactagcagattttggttttgctacaaaatttaaaaataaagatggaactctaaaacaattttatgatactgttggatcaccaccttacatggctcctgaaatctttacttcatctaaagcagataaatatcatgcaaatttaacagatatctggtctattggtatttttgtctttgttcttctgactggagaaataccgtggcaattgccaactaaagaggattcaaacttccgaaattttattgatcacaatggtaatataattcattctagtccttggtgcaagatcaatttaactcatttaagtctattaagaaaattattgcagtttgatcccctaaaaagattaaccataattaatttacagaaacatccatggtattataaacacaacaaatttgcgaattctaacatgctttgtaaagatccttatggtttggcaaaagctttaatgtcaaatttgaaagtctctctaacaaacaaaacttttgatactctaatgactcaagatcctttaattgtagacaactctattaaatggaactataagtttcctggaaataggcatagtaataaaatgatatccacacaacctttacaaaatgatgttgcaaatttacaaacaactgagctaaataatttcaattctaaactgacacaataccaacactttgataataatattgtctttaacactcaatatgagacattttatattccaaaaaagatagaaaaaaaatggttagatcttataagcaatgatgtagccattttacaatttacaaataatcatgataataattctagggtcgaccagtataaaaatatggatttaaagtttagacctttcaatttaacaaaattttattctctagaatcaatggatactgtcttatcgtttttagaaaattctttacatttatgtggtatacctgttaaacctgatttatttgatacttatttaaaattaatagatgactgtgatgttgacaagacaatattccctttacagataaatattagaactgtagatagaagattctctactttaaatggatcaatcgttattaatttaattaataatcaattgaaagttcttgaatttcaaagaaagaagggtgatccattagaatggcgtagacttttcaaaaagattgctgtatgttgtaaagatatcatactagtacccaataagaattgaattaacaaaaaaaaagcatgaaaaaaaagtgggtaccctaatccacaaaataaattgtaataatatcagacgtaatctttatatcgatataatatattaatatttagtaatgcattaatttataaattttacaacaactatatttttttataataaatatcaattgtaagtatatatacatgaaaatagaatattttttctcaataaaaagataaaaataatgaaaatataggaagaagtagataatatctatcaaaatttcctatggctacttcaatctcaaacactcctatatttcatcagtgttataatattctaatttcatcataaaatcaagtaattcaacccgtaaatttcttctttctgcaattggtatagctgctaaatctgctgcagaaaaattatgtagtctactaactaactttctagttttctttgaagggaaatgattctttaaagaagatatagcttcccttgaatttccatttttacctacattatcattttccttttgatggtcttcttcactattaataatgtacgaatcttgtagaaaatcctcattctctatttgttctttatatttagtagtcttattttgtgagttcttgttgtcctcaataactgcgatattattaccattaccattctttatatttaacaccagatgattttgattctctggaatagcctgcaaaacatctgtctgagctgattcttgaaccttcatattattgatattcatagtttcttgactggtttgtctatcatgtaattttaaggaattaaagattggaatacggattgtgtttgtctcttcttccttgatatctttaacggtattctcttttgttattgctgatattcgttcagtactttcattttctgtctccttatgttcttccttatctttgacttctttattcacaaacttgtttgttacattcaaacttctgtcgatattaatattatcagttgatagtgactgagattcatgattatttatctgttcagtttctttattcgattgacaaaataaatcattattaggtatttcagtattattatgtatatttaaccctgctactgccctattatcgtctaaagaattgtgcatttcaacagcttctaaattttctctttgtttgtgttcagtattgtctaagcatacatgattttgaattatattagatacatctttttcttgtgatgtaatattttcatgaacatcacttacaataatatgtatattgtttgttttcatatttacatcactattactatcactaatactatgtgattgagatacagataagttacgctcttcagttaacaagcttgacacagatgaagaaagtttatttataagaaaagttttactatcatcaactattttgttcaccttggatcttttatctgtagtacatataacatctggatgttgagacaaaccctctaactcaagtgatagtttttctgaaattcttctaattggtgaggaaaagatcaaactattactttcattttttagatcaacctctttcgaaactggggatgataaaaattttgaatgacctgtctttatagtcaatccttttagtaacttttcatttttgctagtgtcaaatattttatgaatatcaatcccaggatttatatcctgtgttggttctattttagttttatttatatgtgatagtctctcaacttcctttattgtcgaagaattatcattatttccaacaagtttattctctttattattcacatcttcaggaaaagataatactacttcttctgtatttttatcttttttatctatattttctgaatccaataacgattgtatactacatctagtgaaattaatctgtgtactagtggctacttttaattgagcttgtttttctgtagaacgtttactagtaaaattatttttcctcttcactaaactcgtagcttcattaaaagacatacagttactggatgtaattattttattttctacactagagatgctagtaagcgaagttggcatcacctcgtttaccatatcgtgacagactatatcaattttttgagttactggcacttgtatctcagctttgtcattttcttgatttatagtattctgtaaatattcttttgaagaagaagttatttcaattttatccttcttagaatttttggatatttctaaatttgttttatacaacctttctaattctaaatttattttaattatttgattggagtagcatgatttatctgattctttaccaagagcttttggtatactttccaacaactctattttaaaatcagattttataaaaggaaaataggaaacaacagaattcaaaacattcaccaaaatagtgccgtcatcactacgtatttttgttaaaatatctctgaatagcttcaacttcttatttttttgtatctctgataatcctgttgtatcatcaaacaaaaagaaaacaatgacatcaataaacttattcagatcactatatttcttcaaatttaagaaagctctaattaatgatattctaaaatctgcatctttgtttttaaacatctgacttattgcttggtctatcaatccgtctattttacccccattggaacacagattaactataagactgataggaaaataactcattatttcgtatacttttgcattatggtttgaaaaaaacatttccacataattaatatttgtaaaatgtaaggtgtgttctataacaatactaaatacatcccagttcatttcttcatatgctttattcagtaatttcaaaatcatcttcttttgatcatcctgagaaaaatcactcgatgagttaaacaaaatagagaaaaacaactcagatttgtttattacagaaactaatccttcttcttttaataacctatccagtacataattttttttttcattggatatcattgatatatgttgagtgagaaatggcaacaaagattgttgggagtctttattgacgtatggataaaaactcggctccatagtttctaagatatccgggtggtccagtgtaaacacttgaataaaagtagacatccccttttcatacaaaataggcaatgtattaataaataatgagtgttggaagggtgatacctcttttataagatcaattgtaaagttcaacaatttagggtcatttgtggaaagacaaccattaatgaaacattgcaaagaatttgggggccatgaaatacatttagaaaaaaaaatgtcaaagtatgattgttccattcttgaaaatattgttagaaaattgtcaattatggatgtttctgggatagttttaataaaatctattaataccttaaaagatctaaaatccatggtaggtgataagagtgtcgaacttaaccaattgacaatatatttgtggcaatattcatcaggaatatctaaaaacttgtaaaatatcaaaagttcaggtaattgacttcgcatggatttaattatatctttcaataaactaactacaatatcagtaccatcaaattttatcattttaaaatgtccaaaataattcgctaaatggttgtcttcttctgtaaatataagcgatgaaaatttcataaataatgtgggagaaagtgtagaaaaaatatcaatcgaattcaaaggtaggtggcaaatatttttcaggtaaaaagatactaattcagttaattctataaaagtagatgactttatttgtgcttctggtgttgcattaattaaagcatagagcagagctaaacaatctatctctttaccatattcttttataagtttagtggtgaaatcttttaccattggataccatacattttctagatttgttggtaaagaaggtatttcattcaaatgtattccaactgttgcaataactttgataggaaccacttgttgagggttggataatttatctttataatttgaggaaggttgcttaactataacagtcccgcctaataacctgatgaatatatcacagattagcttttgcaattcattattagtggatttgaaagagagaactcgttcaaacatcggaataattaattcattccaaatattacaaaacaacggtttagcagagtcaatggataactttgaattataaaaataacatgcaattgtataagtgattgctctagttataaatgaaacaccaactgaaatattttgtagaaatactgcgtgttgagacataaaaaacgggatatcaagaatcttataacatttaactctttcttcagaagaaagtttatgcatattcatacatattggataaattaatatcctccatgattttaaagccaaaagtttggcatgatcactgtcagattcaaaagcgagtttatttaaagtcaaccatttattattttttatgcaaatattaataaatgtttgtatcattgtagtattactaaacaatattcccactaaagttaaccaaagatccatggcgatcttataagattttttggtttgcaataaatatactatgtgatgaaacaataatgtttcaagggtaacagcatcaatgttaacatcttttggtatagacataatatttgtgtaagattgctgaagttttttgaaatattgtggtgaaaatacatttttaacaggagtattaacaattgtagaatacaactcttttatgctgatattgcttgtgtcatatattttttttaatagatccaatagtagagaaatcgaaataatacttaatttttcagaataagtatcatattcaataattatttgcggtaagagatcactacataaccaaatatccatatgttttatcatcaagtttggaaatttattcaataaagacttgacataatataccttttctaacatatagttttgactattaatggctttaatatttggtatagcatgaattaaattaacaatttcgggcctagtggcgtagtaagtataaaacttttcctctttcaaaaaagtaagattggaaataagaattggtttattggatttaatatcagttaatgcatttaaagaatattggtagattattttaatttctgattgtatatcattattattggataaccatttgacaattttaaaatttgataagagaatggtaaaaaacttcactatttgataatataacctggaaacaaatggatctttcggattatcgttatcatttttgttatcatgatttttatcatcttttatcacattgtcattttctttatccatctttgtttctttatttttcttaagatttttacttttgctattttgacctgttaaaatattattactattggttattatgtcattttttaataacttcttttgtgtcaaattccattgtggtatacaaatttttataatttttatgaaattctcgattaaaatattaatctttttttcatttacatcatttatatttttcattgtaataataggtataatattgttaaaagttgcatagatttcgaatcttttttcattatacggatatgaatcatgctccaatataaataatccacctataataatatttttgaattctattaaatttctgctatcagataaactatgtatttcaccacttgcccaatattcaagttgaaatggatcgtcaatattagtagatgcagtagtagtagtaggaagatttgcattatcgattgtggaatctttattagttatattaagaatatttttattatttataataaattgtgaaggattgttattaagactaatatcactagtgcttttatttttcttacgattatgattattattatttgatatcattgatgcatttttagatatatttatctcattctttttttttaatattgattttggaggtgatttattaattcttggcgaggatgctataatactgttaaaatcttgttgatattgcggtactctagtaggtgaaccattgaaataaaaactatttttaagtggcgatgattcaatttcaatatgatctgagaatgaaacagtttttttgatcggagaagaatttaaattattgttatcttcatcttcagtttcagccagattattttgattaaacaattgtctacttattatattgttttgtgtcacagtttttcttctcttcggtgttggtgattcataactattacagttactactattgttattgaaactttgattattaatattatcttgattttttggacttatcttgattttaagattattaggattactagaattattgctattttctattatagccggtaaagtttggttgttaagccagggtaaagaatttgaagactgttcattattttttaaagatctttttgaaatgtgtttgtccaacacttctaaagcacgtaaatttcttttagaagatgatttaggtggcattttattatctaaataaaacctatagatcgaattgaattgttagaatcgttctttttttttattagtcatctaattgaatggaagaaataaatttttcccaataaaaaaaaaaattaaaaataaaaaaacaatcaataatccaacttgccaaataattaatttcactcccttctcttcgtcttccaattttttattagactttattatgcctggaaaccttgcatcaaattgatttgtatcattatctcatacgattattctaaaatacttcgaatttttgtcgcaatattttcgttttgattctgaaatttttcaagtgatttttttttgtctttttttttatgaaaatgattttattttttgttaggtccttatctcattgcgtcagtcattttctcgttttttatgtggtgacattattagcgataagaacatgtcaatatatatgaagagttctaaaaattacaggccagtgtgagattgaaggaatctgggaatagggctatatatatatgtatatttatgtatattaagtgaagaatggcattcacatggaaagttgtatttctaggagaatcatcggtgggtaaaacatccatcataaccagatatataacagggcagttccttagagataatgcaacgattggagctgcgttcatttcacatcaattaaaaatatcttctgagcacattgtgcaattggagatatgggataccgctggccaagaaagatatagatctttgaccacaatgtattatcgtaatacgaatgtggctattgttgtttttgacttatctaattttcatatcgatgctactttgaatgatatcgatatatggattgagaaactatatgaatataataatattcctaataatgataatgataaactgaatataataatcgtgggtaataaaatcgatctattggaggaaaatgatgatatgttggctattagagaaacaatgctacgatatctggatatcaaaaaaaatcaagattataacaatattgttttaaaatatttagaggtaagtgcaaagacaggagagaatgtgtcaaatttatttgaaaatgttattgttgatttaattccaaaggataaattatatttcaatgataataataataacaataatataatatcattaggcattgattcaaagaaggataaatatataaagaatcgacaatgcaattgttgaccatggaaactggacaataatatatattgcaagagagtattaaaagttcataaaatttttactgattacacactttacaatataaaccatgaaaatatgtattctttcttgatttatgtatacatacgtgtgtgtttattattcatagtacttagatgatggttataataagttaattaatttacttataattcaccaggaacagggaattgcccgacccaattatagatttcgtcagccaattctttgacttctcttgattccttgcataattgtttgaatctgttcaatctctctgttggtgtcaatggtttgtcctcaatagaagaatctgaaccagaagttttggcagtttcctgttgtttcaagtctaaggctaattttctagctttatcaatgtattctgcaactttagcaaaatctttctcttggaaacctcttgtagtcatggcaggagtacctactcttaagccagatgggaacatagcggatttatcagttggaatggtatttttattagcagcaatattgatatgttgtaaaatagcctccaatctggcaccatcaacatcagtctcagacaagtcaattaaaatcaaatggttgtcagttccgccagacaccaatttgaagccacggttacgcaattctttagcaaaatatttagagttgctgacgattctcttttgatattctttaaattctggggtcattgcttgtttcaaagctacggacaatgcagatattgtgtgattgtgtgggccaccttgatggccagggaacactgagaaattgatctttttatcgaatggatacatgatctgctttccctttgcagtagtcctttcgaccccctttctgtaaaagatcattgcaccacgaggacctctcaaggatttatgtgtggtagttgtgacaatatcagagtacgggaatggagatgggatcacttctgcggcaacaagcccagagatatgagccatgtcacttaaaagataggcaccacattctctagctattttctgaaatctttcatagtcgatcaaacgagaataggcggaggtaccggctacaataatcttaggtctaaacaatttagaagtcttagataaagcctcatagtcgattaaaccggtggatagatctaatctatatggcatagattggaaatacttggagatgaaactgattggagtcccagaattgagactgtaaccgtgtgatagatggccaccgtgaggtaggtcaagacccatcaatctatcaccgacattcatgatagacgaataggcgtataagttagcaggagcaccgctcaatggttgtacgttgaccccccattcgtttggatctaatttatacaattctaaagccctacgttgacaaagtgattccatttcatctatatattggttaccaccgtaataacgggcgcctgggtagccttcagaatatttattttgaaattcagaacctaaaagatccataacagatttggaagtaaagttttcggatggaatcagagtaattgaatgtttttgtctcaatttttccttttgtaaaatggaatacatttcaggatcaatatcttggacatgttttgatactaaaacctgatcttttgagacagatgatttcaaaattacagaggttaaggagaatgatctagtggttaatgcttgtgcagcttttttggaagataatctcgcaagcatatttaggtgactggtacgttgcctggttggttatgtgagtgtttgaaatctaacgagacttaaaacccaacaacacatatttaataagcaatagtcagtcaattaatcaatcaatcaattaagtttacatcttcttttcaaatcgatgaaaggaagccaaggagaagagaagaagagtcatattaagatgcaatgcgatggctgcataatggaggggaagaaaatagagatgaggcggaaatacaccaccgacattgctctttctctttctttaattttcggttttttgattttgatgcattcttttttttttttgcttgtttgtttgttttggattatcgaaagaaaaaacaagacaccgaaagccggggagggggggagaaaagatcaaaaagaaaaattaagcagaattccacatgaaaccattttgaatctctgtataaaacttgcgtgtatgtatgtgtgttttaatcttcatttgtaggttgtttggaaagttgatcagttgtgaactgaaagttgttgactaatttgttaaaattacaggcggtttctcgagaaggataataataatcacaataccgttactgatactactatgacattgattaaaaaggttggtttacctgtattatttggtatgggtacatattatgtttgcatttccgatcaatataaaaatttttgtaatagcaaatgtttctggacacgaaccaatgagcaagtaagacaaatcttggatcattcacaagagacacattttcttcatgattattctaaattatttcaaaataatgattctgtatctaatgcaaacactgtagaaaataagggtggtgaaaatattatcaacacaactagtaacgtacaattactgttagtattaagcaaagtagaattattgaaagatatatggaactaccaagtttataaactctggaattggctatattcttcataatgtttatacagcatacctctataggtatatcagttatattttaatattctttatttatttatttagtcatgtctataattttaaatattgaaagaacatttagaaactttacttctttatttttttttatttttctttcctatctcgattttacatgtgaaattttatattttcccttgatcaaataaatttacatgtaagatatttgctactgtaatcaattggttcgatgcacgatcttcaataaccataatagattaagaaactcccacatagagaaagagaaagaagttcgaaaaaaaatgactgaacaaagagaagaaattgatctggtggatattccagattctcatattaattatgacgatgcaatcgaatactggaccaatattcctgctacagtcaatggtgtgcttggtggttacggtgaacaaacagtggttcctaccatggatgtccttggttcatcattctttctacgtaaattaaaatccagaatgatatgtcccagtggaatgataaaatatggggttgacatcggtgctggaataggtagaataaccagagatatgttacataaatactgtgataagatcgatttggtggaacctgtagaaccctttgtcaagcagatgcaagatgtagaattggctgatttgattgctgaagggaagattggcaccatttataaacttggaatgcaagattggactcctgaaaaaggcaaatactgggtcatttggtgtcagtggtgtgttggtcatttgccagataaggaatttgttcaatttttgaaaagatgtaaagatgggttacagtctaacggcacaatcattgtcaaagaaaataatactccatttgacaaagacgattttgatgaaaccgattctagcgttactagatcagataagaaattcagacaattgtttgaagagagtgggttgaaacttatcgcaacggaaaaacaaaagggtttaccaaaggaactatacactgtaagaatgtacgctttaaaaccacaataatatcaaaatagaaatttaaaaaactaataaataatagaaaaaaaaaagaaaggaaaagaaatacacacacacacacacacatacatacatacatacatatatatatatatatatatatatatatatatacagggatattacatcaatgatatagaatattaatattatcatcaaatcaatttcttacctgaatacaatttttatatatttgttgacgtatgtgcgtactatatgtatatatttactatcacaaatcactagtaatttctcatcagaaattgcccaatgaatatcttaaataagtatagggccacttaattgcacgtttgttatcagttagttttcatctagctaatatcagcaacacttgtcttgtatgaattatcagaatcctttaaagttcaaacaaatgctaaaaagccaaaaaaaaaaaacgaaaaaaaaaaaaccggatacgtcaattttgtcaatttctgaagtttcaagaaattttagataaaaaaagaagaaaaaagaaaagaaaacagaagatttgttggtgtaaacaaataaaagttacaaaacgatacattaaagtgtcatatgtttaattagtctttaccttgaacagactagaggaaagagtatttgtgtgagaatccatccaaccaaaaagtctaccaactatttctatattaatttatatatatttgttgtttttacttattccattgaaggggatattattgttttaatttaatattttccagtaagcaatgattagttctggcagtgaatttcaaacgattcatgatgattcacaagattcaatggctttatctcctcaattaagtgaaataaattcccaattctcaaattttgatccaaatttggatagtatgaatcatgctggtgggaataataataataacaataataacaataataacaataataataataataataataatgaaagtaataataacccatctattttaacaaataatactactaattctttcaatgacggtacatcaactcagctagttaacagaattcaagatagcgagttattgcaaagtgccgcaatccaaaaagtactcaattctgatgttgcgatcaatgccctgttatttaaatttaaacagtcgttattgacctgcgaagagtttattaaatttctaagaaagaaatatatgtttgaagatgaacatacccaagaacttttaaagcattatagaaacttctttcaagcaagtaatggtgtttcttccttaaaaaagactttccatgatattttacaatttgatgggaaattaggacaggtaaagcaaagttatgtcaaagcattacaaaaaatgtacgatgaaataagttctctattattaacgatgactaaagtcagaaagtctattaaagaaaattcaaaaagattggagaaagaagtcatggattctattcataacgctgaaaaagcacaaagccgttataattccttatgtcaagattacgaaaagttaagaatggaagatccaacaaagacgaaattgactttgaggggttcaaagacaacaagagagcaagaagaggagttgttaaggaaaatagatattgcagaccaagattacagatcaaaggttgaccatgctaattcgttaagggataattttttacaaagagagagacctcatattgtgacagaactgaaaaatttgattcttgaaatggatactgctatggcaatacaattacaaaagtatactatatatacagagaatttgattttgaatagtggtgttacaataactcccttcaataagttggaaaaatctatgaaatcaattgcctcttctgtacgaaacgagagagatctttatataatgctaaacaaatataatagtggtaataaaaacactttattaattaataaaaacttgattccaattaattataaaattcatccatctatggagagacgagcagctgctaaaaaaaagtctgctcctaaatttgcagttgatccatctaggaactcaattccaaaaagacaaatatcaacacataatgattctcctttcactaacacatcaatatcaccaacagcgtttgttagaccgatggctttaaataaaaaccagtctttacccaattcagaatccttctccactgctatatcacatgtttccacgccattaacaccatctacatcaagttattccttagtcctgaataataaaccttccagctcatataacaatattaatagtcataaaaaaaataataataatgaaggtaatagtggtgatactaacactagtgatactataagtagcaacacaaccaaggataatagcccacaaagattcccatcattagatccaggcaaaaaagaatatcgattaccaagtataccggcaacattagcatctcttaacacagatgattcagatagaccagtatcacatgtacagactatttctagtttaccacctggtatacaaaataatttcaaaacatttaatgtacctttagagaatctcattgaatttgaacaagatatggttccaactatagtatcccagtgtatatatgtggtagataagtatgggctagatttagagggtatctatagaagatcagcaaatgtattagatgttagtaaattaaaagaggaaatcgatacagacccatcgaatatttctatgattttaccacccaaggactacactgatgcagatatttatttagttggatccctactaaaaactttttttgccagtcttcctgacactttattacctcacagtatatcaaatgaattaaagacttgctttgctattgatgattatacaactaaaaagaattttatgcatgggttgttatataaattacctgatgcacaatattggactttaagatcattattatttcatttaaaaagagtgttggctcatgaagaacataatagaatgaatttgaaagctttatgtataatatggggtcctacgattattccaccaaatgatgacgacgttaatgatgtcaattatcaaattgctttaatggaggtattaatcaatgtggctgatcaggcttttgaacctgagtaatctattttgctttaggttaagttataaatcgtaattataatacaactattcatactgggtaaaaatagtaaaaaacaaatacaaactgttacaagtagcaaagagaagttatcatatcttatataaaaataataatttttactagtaatatataagtgaatataactaaattagacaattaaagttttaataaaaaatattaattcataataattctatatatatatgcgtctataaagagatttatataatttatttgaaattaaagtcttaaaatatttgaatctaagcctgaacaatcatatgcatagttgaatcttatcttatttttatcttttattaataattttaatcctattaacttgtttaaggaagaaaaaaactgtttactttgcggtttggtgattttaatagtactaataaaaccttctatggtcattacatcatttttgttaaaacaatatagtattgcagcaatggacatattagtctcaactaatagataagatccatcagatagcttgataggagtttcaagcaaaacataatgaattgctgtattattttctatcactctagaagttgatgctaattcagcaattactgtttgccatcttttcttgaagccatttgtggcccaaaacgtttttaacggtgctgcatttatatttacataatgctgtgggataagtatacatgtaaatatagaaccattactcaaatattttttattctcaatagcatcttctataaacttcaataatttatttttatcatcaatacattctttctttaggttcaaataaatatgtgaattaaattccttaataatatgaccaagttgatcatctatcgatggttttacaattattttaataaatcttggtagccaataacttttaagaaatatttcatagtttggacaatatctttttataaaataactcaaatatgggtagtcatagtcagtgtcattatccatacttttatttgcataatgttccttgaattggtaatatttctggttaagaaattttgcaagagagctataatatttatttggtgatccttcgatggtttttaaaaaatgtttacgaagttcttctaacagcatagaataatattctttactttgaatatgtggtccaggatctaaagatttgatttgttgaaatgtgtcttcaaaattatcaggcttgaatattatcttatttattgttacaaaattaaatccaaagtcatcgtctatttggtgaagttgtgtatcagatatatttaattccatccagtaacgtctctttggagaatcgttatatttaagtctgaaagcatctttccataatgaatgatacattgtatagtcaatccatcctttctgttcattttttaatagaattaataggatttcagaatctgcaaaaatctcttgaaagcccatgactcgaaattgatttctaatattagaacccaaaaaagttccaaatttaataaagttagaccaaatctgaataacagtatcaaatttgccagtattcgatatttttgcaatatatgagacaaaattttctctcatcctcttaatcatttgttccattgaacctgtttgtagagaattatatttatcatactcacataaaaatttggcaaaatctaccaattgatatatctgcatctcattgccattgatgttttcaataagatttttccatattgcttcctctaatggaatcttactataaaagtttgaagatttgaagtaagcaataatctgacttttagaaaaaaatattggagagatcttcatggataactcatcttgggctttctttaacgagttaagtgtattggataacaagtcaattttgcattcaaaatttttcataactagcaagatatcttcaaatgtcaaatcattacatctttctaactcctttatgatctcattaattcttttcttaaaaaaatcatgcagaatgacatacacataggtacatgctgtttgcttggaaaactttgtattgaattttttgattaataagctgatgttatcaacaatagtatatatgttatgaggggtatttatagtccataatttagtcaattcatcattgagagcgtcacgaagtcttattgaaatattgcctcgctgttgtttagaagcttttgttggtgaaaccatttaggaaaaaaagccaaaaaaactagtttcactatgaaaaatcgagtattaatagattaggttgtagttttgcatgccttcattgttaatttatcttaaaataagatttccaagtttttgttttttgttttcatgaaatgatgatttgctttgaatatgtttgttttcatgcatataactgatttttatttggtttgtcttttttttaaaaaaaatatcagcctaaaatgccaaagtaaaaaaaaatgcagacaaatgattaatcgaaatctattatttgttacatgttgtatggttgttttaaaagaagagtattgatagactgaaagttattgctggggtgtacttttcgttacaaaatagactagactattgtattataacaatcaaagctttttgagtgattggcaccttgttaattcagtagttttttgtttccattgaaatatgcttgttcaaaatcaagtagaccaagctagagaattggcaaatcaatttaagaaacaaggtcattttgataaattgaaatcagagattctctctagagaatcaaacatcaagacaaaagaaaatgttacagtacctggctctttggaaacagtattaaaaaatgtaacaacctcgatagtgaaagatatggtatctaaagatgaggatttgattttcaagaataggggatcgacaagtgctttattggaagcacaattacttaaagatgattataaaaaatttggagagggcaaaaatgggatcgaactaaatagatatttacaatcttgcatcaacgacccagatttgtatgaaactatatacaaggaattagctcaattagtttcaaaagaaaatattatagtgacgaatactcctaataatagtcaataatataggttttcccgaatctgttacatatttatacaagtgaaaaagaagataaatatacagacatgttacagaaattaggtgatttctttgcatttggtgatctcgttattttgcggcagatcataggcaaaatcttcgacatagagaacaccttttctgtctaggatatataaaacataaccatcgcagctaaatctcattgaagcagattcatgtgccctatatgcatctgcaaccatttctacaaccacagttcttctcttttcgttatcaattattgtgggtgctgacactaagtacaccgaaccatttttatctaagaatgctatagaatcatttctggatgatatttcacatttatggattttatagcccaaatcagaaaatctattgagtaaagttggttgtgcaacactagttaaattactgatatcttcaatctttgtgtttacgataatagcaggtgaattgaatgctgtggatgtaacacacattaaactggggtttccaggaaacaattttgtatctgtaatgccttcagattctaaagatgtatcaattgatcttaaactcttcataataagtctaggttcatttacatttttcaaggaaataattaggaagcgagattccatggtagttgaacatgataaatatcgtccatctgttgataactgtatagtatttatcgggtctctgtaaggtaaagcgactgtaataggtgatggaaaatcatactgagaaatcatattattttttcctattctatggagtgtaattagagcttgttcggaattagtttttctatctttacctacaataccgcaagctattatagtgccagagggatcaatatcaatgcatcttatgtaatatttagaactataataatgaatcattttaccattattatttaaatcaaatacttgaattgaatttttaatgtcactaataactaagaaattattagaaagcttacaatagatgtattcgccaaatattatgttttctttttctactcctaatatggtagagtctaattgatttaaatgatcaaaagcagaaccatattcacctgtatttctcccacagaaaagtaatgttggcggatttttgtatacattttgtggtattgaataaacttcccatttatgtttagagattaaagcaaatttcgaacaatcaggtgatattgatgtattaataaacaattttgatttagtttttaaaaattttgaatgcgttttaaaaatgtatctttttctgtatattgggaaacaatttgcaaaataatattcttttttttcatctaaaggtacagatagttgtacttttgtgttatcagttgtgttgccagtccctttggattgatcatatgcagattcttgggacaactgacttgcaattattgtatttgaattattagttaaactagcattctctgaaagataatcagacttcttatcctggttattaactatatctctttgtgtattgtttgaatctagagagttatctaatgggatatcctctaactctctattagaaacatttttattgatttgttcttgtgaatttacttctgatgcaatcttgtaaaatagatttattaaatttatttgattcctgtttatatctctagatgatagatttagtatagctctttgttgtaccacttcattatatttaatcgaaggaaaggataaaaaagggctactagcagtgctgtcaactttcttatttactggatcagtcgatatattttgtgattgactatcatagtccggacagttaacaatgctagcatttgtcactagatttgcatttttatttactgtgctctgactatttagtgattcctcataattaatcctatcagcagtaattttttcctctatgtcatctttgaacgattgtatttgtaagtatatgttacgtaaaggtttcactggacctacaatggatacgttttgtttgttgcataatggacaatgtattagatcattttttgttattttaataatatcgtagtataaagactcagctatgcagcaaccgcaagttaaaattgaacaatcttccacaatacaataaccgagaccatatatataatggccaagttgttgattaaattcacaggaaaataattgtttcggaagtaataagttttgttctattgtttttatcaaatgtgttgtatctggcatatattgtgcatatatgataattgaatttatccaatataaagaaagggaccaataaatattatctttggtaatgttaaaatttaacaaaatgagttgattataaacttgaaagtttaattgtttttcttttgtcctcgcagttaccgatcgaaattttcgacctcgagaaaacggaaataaaacaagcaaaaaccagaaagaagatgatggagaaagggaacgaaagggaaagatcctaaagaacacagcaagtttgttatatttggggttgtggggttaatactatcagtgtacttttttttttttcagctggttcgtacgtgatacgcttgatatctattattgacttgattgtttctaactttagtggtaacagagaggataagtgaaagggaaaggaaaacaagtgtaagtaaacaacaaaaaaacacaattaaaacattttttgtaaaatgggatcacgaccttctaaacaagagactgcagtcaaattttctatggtagggagtaacttaaacttctcagatgatgtacttaaaagattggctcaatctaatgaaaccgatttctcaagaaatgaggaagcagaaagattgttagaaaaggaggttaataaaagactgattcaattggagaaggaaactttaaagaatttcgaggagcatttgaagacctctttaatattgagtgaaattgagcctgaaccactaacttcaggctctttggataataaaattcagaagctagaggaaaaattgaaaaaactacaatcaacgcaacaagatgtccttgatgataatggtaaaaaaattagagaagagcttctgaattgtttaattgataataaaggtaaacctttgaactgttatgattatatacaacagtttaataaagttgttaatcaatcataattgtaatgaagggggaaacgatttatttcccgtctggtgtggtagtgtatttaattattctttcctatgaatcttcctttcttatttgtatatatactttgctatctctttttttttttattttttattttatattctttagtactatgaactgttattacatctacatgtatatatagaaattgtggaagttgtaattaaaatgtatataatattatttatcggttcaagttcttaaacaaaaaaaaaatcgtaaaataataataataattctgataattctagtgatgtaagtgaaatgtccatattcatttttttattttagttttttttttataatccaaatcctttgtataaaaggattaaagcactatcactttcaccaccaccagctaaagattcaattttatctttttcaataatactaaccttgtcatcattgaatttataccagatattatcatcatgatcagctctaataaaagcttgataatggccagactctgaattagcaccttggtgtgttatgacgccaactaaatcataaacacatgatggattttcacctttttgtaaattgttaggaaaatgtttcttaaattcatctaaccaatattgttttttgctttcttgaagagccttctctgtctccatttcttcctttggtgtcattacaacaccattacttaatgggtcgactttacgttttttggattctctttctgcttcctccttttccttttcaattttccttaattcctcacggactttaattttttcttgttgatattcacttgttaataattctgaaacatccaattgaaatgggaatgtgaccttacgtaaaattttagattttttgccacttgatcttttccaaaagaatctgacaaattggacagttaagaatttaggtaatttgattatttcctttttaactaaaaaatcagaattgttaccagtaatctctgatctcttttcaataatttcattcaaagaatcaatcaatccgtttcttaagaaatttgtagatccagaaatatgacattgtaatttaaaatcatcttcatcttctcttatagtgatatcattttcattatgtttgtctttgatagtagttctgaatttgattctaaaatcttcagaaaatttatcaccaaataccacagtcagtgaatgaaatagctgggtaaacaattcttctgcatcttgttgtttaaaaaatccagattgtggatctctttcagcaaactgaggataagtctttctaagaatgtttaaaagaactaaaggcataatagattggaatttcttattctttaaaccctcaaaacaacgcttgatttcttgtactaatttgtgatgaatttcatcttgtggattaatgcttgtaaaagtgctttgattatagcttagaattaattctcttaattgatgtaaactatataacccctgtaatgtagcattcaaatagcatgtattccccatattcttgaaaccaataggtaaatcgtttatcttttgtaactgttgatcaggagaaaggtcttcgataaagtggctcctctcctttggttttgaaatcaaatttgcatccgaagtgcctaataacattactgttgatccattcttaattagactggataaatttgaaacatttggatcagttaaacccgtttttaccatatacttttggcgctcaattggaactgaggtcaactgttcaatctgttcttttaattgaccaacggttgtatcatcagtgatcttaatagaatatgttttaccagcatgtttaatattaaattctaacgacattattgactgattctctgaagttgtaacaaaattctttttttttttggatttctataaagcctcttgatgatccttcaatgaaccacattgctgaggaacagatcgaaagaagagattcacatattatagacacttctttgtttatttcaatgaaaaagggttcactttcaaaaagaaatgtctaaattttgatcgccactcgctgtaaagcaattcccacttcgaaattctgaaaatagaaaaacagtgaaaagtgggaaaaaaaaaaaaagaaaaagaaaaacagcttaaaaaaaattttggtaagacgtatctgcaaaagttattgagaccatctagattgattcatcattgagtctttttgcttttttgccagttgattgtatttgagagtgcgattgttaattgcaggagggtgaatcctaatagcccaagataatagacattgtttaatcatttatatatttaaagttgctttacgttattttttctttttattgcccacctgctaaaataatatcgaggcgaatttacaaatgagtacatcgactgtcgttcctcctagaaagagattatctgaaggtctaactgttactcaaaaagttttcatcagatctagaaatggtggtgctactaagatagttagagaacactatctaagaaatgatattccttgtctttcaaaagcatgtgatagttgtcaagaaattgttgttcccgatgcttctaatcaattgccaaagtttgtattatctgaattaccacaacctctacctaatggcattgggaaacattatgttgttcttgacacaaatatcattcttttagctattgatcttttggagaatccagattgtttttttgatgttattgttccacagattgtgttggatgaagttagaaataggtcttatccagtttatacgagactaagaactctctgtagagatagcgatgataagaagaggtttattgtttttcataatgaatttaatgaaaacacgttcattaccagaagggaaaatgaaactatcaacgatagaaatgatagagccattagaaaaacatgtgaatggtatgcatcccatttaactaagcatggtataaaaattgtcttagtatctaacgatagattaaatagagaagctgctcaaaggaaacaggaaaatcaggcatatgtgacaaagagtctttttgaatatgtcagtttactgcctaatggcgaagatattaaagatttgattccaaatacagattcaacagaactttcagataataaggatgaggagggtttatcagaatttgttttcccagaatattattccacagcaagaatcatgggtggtatcaaaaatggagtcttgtaccaaggtactattcaaatatcagaatataactttttggaaggtagtatatcgttaccaagattttctaaacctgtcttggttgttggacagaaaaatttaaatagagcttttaacggggatcaggtcgttgtagaactattaccagaatcggaatggaaggcaccatcttctattgcaatggattcagaacatttcgacgtaaatgataatccagacgttgatgaaagtgaagagttaactgataagacaaatagcatcataatttctgataagcaacgtcgtttattagcaagggatgctattcatgctcaaaaatccaaaaaggttcaaccaacagctagagttgtggcagtcactagaagatcatggagacaatatgttggtcaaattgcaccaagttcagttgatttgaaaaatggtggtactcaaaatgtatttgtgattttaatgaataaatgtcttccaaaaatcaggattcgtactaggcgtgcagttgaattattggataaaagaattgttatttctgtagactcttggccgactactcataaatatccattaggtcattttgtcagagatttgggtggcatagaaacagtcgaagctgagactgaagctttgttattagaacatgatgtggaatatagaccattttctaagaaagttttagagtgtctaccaaaagagggtcatgattggaaagcacctgcagatttaagggacctagaagccaatagtaaggatccattgttaaagaataggaaggatttaagagatagattgatttgtagtatcgatccacctggttgtgtagatattgatgatgctttgcatgcaaaaaaattgccaaatggtaattgggaagttggtgtccatattgcagacgttactcattttgttaaaccaggttcggctgttgatgcagaagctgcttctaggggtacatctgtttatttagtagataaaagaattgatatgttgccgatgttattaggtacagatttatgttctttgaaaccatatgttgatagatatgctttttctgtcatttgggaattagacgataatgcagacattgtcaatgttgattttactaaatcggttattagatctagagaagcattttcatatgaacaagcacagattagaattgataatcttgaacaaaaagatgaattgacattaggtatgagggcattacttaatttttctataaagttgaaaaataaacgtttggctgctggtgcattaaatttggcatcgccagaagttaaagttcatatggatagtgaaacttccgatccaggtgaagttgaaataaaaaaattgttagctactaattctttagttgaagagtttatgttgttagccaatatatcggttgctagaaagatctatgatgcattccctcaaacagcaatgttgagaagacatgctgcaccacctgccaccaatttcgaaattcttaatgagatgttacaaagaaggaaggggatgtctatatcgttagagtcttctaaagcattagcagattcattagatcgttgtgaagatccaaaagatccatatttcaataccttggttcgtatcatgtctacacgttgcatgatggcagcacaatatttctattctggtgcatattcatacccagatttcaaacattatggtttggcagtggatatatatacacatttcacatcaccaattagacgttattgtgacgtggtggcacatagacaacttgcaggtgcgatcggttatgagccattgagtttagttcacagagataaacataaaatggatatgatttgtcgaaatattaataagaggcatagaaatgcacaatttgctggtagggctagtattgaatattatgtgggtcaagtaatgagaaacaatgaatcaaccgagtcaggctatgttattaaagtgttcaataacggtattgtggtgttagtacctaaatttggggtagaagggttgataagattggagaatttgacaaatgatgttaatggagccgaatatgatgaagttgaatttaaattatcttttaaggacaaaaattccggaaaaattagagacgtttatgtttttgataatgttgaggtacaagtgaaatctgtgctagatcctataactagcaagcgtaaagcggaactactacttaaataaatacaaaattatgtacaatatatagaaacgtgaatatcatatagaaaaaggagataggtaaaacatatttctaggggaaggttgtcttgtcttgagaaaacaaatataaatattaatttaacaataagttagattaaggtatataatactattgtatggtagaattgctgctaattttagcagtaacagtacaataatattgtatctttggatcgctttaaaaaaaaatattttaatatctgcaactttttaggtttgtcataactttacattactctgtccaaatatataaatgagttaaataaaaaaaagagggaaaagaaatcattaaaaagaaacaaaagagagccttttgtaaaaaaaagaaaaagctaaatacggttgattttgaagtcaattaaaaaataaagttcatatttacaagttattgatgaatgttacacaaatagaataatcattatgactcgcaagaattgtaaataggccataccatgaaaaattaaatctagaatatttgtcttgtgatgtaaaaatttagccatggattagaattctttagttgatttcaaatttattgttttttgatcttcttttttattttagatcgaaattttcgtttgtttcattgtaatttattctatcataatccaatggacagctattgaatatctatgtaattgcataaaggttttggataaataagtcaaggctagattggaatctagtatgtgtgttttagcgaattgtagcggatttcagattccatgtgtttgataataagagtttttttattattgaagtttctataaaggattgttcttacttttacaaaaaacgaaaaaatattttatgtttcattttttttatgttttttccactagagaaagttttccggagatttgaagaattgaaaaatttttaacaagagctgttgaaagaaatgtaacatgttcgcattacatagaatgttctataatgaaataaatagaacaataagattttagcagacactaaacgataaattgttgagtaataatcattgagaagtcaccaaaagttgttgagtttgtttattaaatatcttactgttcgtagaggaaaatggcttaatgttaacatatataaagccaaggatttcatcatacattatttttatcttatttacaatctttgtatattattatttctatattgtatacagagaaagaaagtgaaaaactttattataattttgtatactaaatctgtttaatataatattgagaatgcttactatatatccaatgaatacaggcgctcattctcaacactgtgtatctacacgaatccagtaaaaaaataaagcaagcacttacaactcaatgatatgtaccataaacatcaaaactaggagctccaaattctatcagtgtcaattgttgtctctggactatatattgtattcataagttatagaatatgtactttttcatttaactactaattaagttatccactattttagtttgttatgatatttattgtgaactaaccaggattcaagaaaagaagtcaattaggtcttgagaaatactaattaaggttttatgatacttaccaaaaaactatcttagtttgaatttcaaataatgttcagtaatatgaatgtcaacaatgatttaatctttcagtttgggaattatataatctttgaaattataggttatctggtttgccagaaattcacagtgaacggcccagatagtagtagaagatctatcagcaatatcacttctccaaacagacagtagaatattataagatttccaatcatttcttacaagtaaatatttactaactagtaaagtgggactctgtatatacaaccgtacaagcacttggacataacttataagacattggtattcctggctatcactcacgagtaaattagatttcgctcacaattaacttagatttgtttatgttctttataattatgtttatttctgatatatatagcagtgtgtgataaatcttcaggggagaagggtgaatcctgtttgggtttttttaatcaaaatgtttcttttgattttttttattttgaaaattttcttttttgaaactaaaatttggattaaaacacgactgggaaaaaggtaagaatggaattgaaattacacacagatttatccaactctcgcatttggacagatgctagattggtgacctggtttgtgacaattgaaacataacttatattctaaacataaacggtataggtcctctttatcacgcttagaagaagtgtcatacgatgattttgtctcagtagaattgtgagatcttcctcttctaaaagcagatgcatgagcagaatatgtagaataacctctacgattacggtaggaggtgcggatagccatgccagtatcatcattagcctcaactgtgactggagaagagtcagatgaaactttacttgtaatgttcagaaaaataggatctatcaaacggcgttcacatctacgagctaactctacagcttcatataatgtaattggaatttgcgaaatgactacctttctagtgtctggttttaagcctttaataaaataacgaaccaattctggtttacttatggcaccatctggtaacagatccttatattggtagaattctttaatgtatccatcaatgttgtcgtgttgggacagcaaacgaagtttacgaccaacattgtttgtatctatttgggcaccaaagtaggcagaaaagtgggatacgaaattagaataagatgtcgtatgaatatcgtgatcaacaacatatatatagaaccattgagtagctttactaccaatattgtcaaagaagatacaaattttgcgaaaatcatctgtgacattaaataaactaaactttaactctaaagataacaaaaattcgcgtaaggtaaagactgaacgagttgaacctgtgaaaagttgagcgacctttatggcttgaacgaagataggattggttgggaattcggacatgatggacagatattttggcgacgctaccagttgttatagtttggacttaggaccaattcttttaacaatactattgaacgaatagtaagggcaataacaaatatataagaatgttatatatatctaggaaagttaaggatttattgcctgttttttttattatgtttatatacaacatatatattatttacgaaaaacctgttatggaagatgatcttttatctccagaaaacgttgtccttttatatgttttctggagttcgatcaattattcagatttgtatattaacgagcttagtgatccaaaccctaaattttattacattaatctaggtgcactagtggattagaactgcaccccaattctttaatcatagtaattgttattattctattctacaacaaaaaatgtggtttaatcctctcggtagccaagttggtttaaggcgcaagactgtaaaggggatctggtatggatcgtcgagtaatcttgagatcgggtgttcgactcacccccgggagatatttttactacttttgtgacatgtgaaattcttgtgtagagtatagtttatgtacaacagatgaagacccactatgagagatatactcttcaagaactctaaaatagataagtgattcttggttgggtgtccatgtatgatacatcaactttactccacactcagggagtaactaacgtacgcatatatacttatgcttatacttatataaataagaaaaacaagaacgtcattgtcgactaaagagttttcaagattgtccagagtgatatcaagacagtatatatcgcacaattctgtaacatatatgcaagaagtcatgagcaattgtatatatggaaatatatacattttttcttagaatataagataagatcaaattatttttgattcctttccatccgtaagatatataaatataactctttattagatgaagtgcacacagataagtattacatatataactatgaaaaacaagaatgttttgggtatagagtttgcaagatcttctattttaatattagaaccatttataaaataatacatcatatggagataggaaagactattttttttttggtcttaacttattgtatagtacattttacatactttgataatattttcttgaatattggatatttagtgttggataaaattataacctttaaaaagatatatatactattactcatattaatataactgtgtatattaataataaacaaaggtatataatctatttgttaaatttttgtctactgtattccctgaacctttattttttcgtaggtatataaagaaaaattttagttttacaagttcttttataatagcaacaccttacattaatgttttccaaaaaatgttgaatgatttttcaagcaaaatgattagcatcaagatagattccataaaattttttcttaacattttaaaaaccacatattcaattcttaattttttcttttataactgttaagtatttgagaacgttcagattgatttttaaatatatttagcataagaagatcaccaaatgcaagtatagtgaaattgttgtataattcacataaaaaatactaactagaattaaaactatgaaaaaatttataaactagtttatctaaggtaaataaatattatatctgcgatggaagatgttttgcttttacctaataactgagaaaattaaattgattttaataaaaaaactaaatttagagtatttattttactttcaatttgttaggatatggggttaacaaaaaatacgaaatattatacatcaaagtattgctatgttggtataatatatcatatatgtgtgcttctatagttcttttttatctctcataacaatttaatattttaaaacctgacatttaatatactcaatagattagattaacctatcattatcatttaactttggaaaaatgaaatttacatcatatttaccatatttcataatagaatagctatctaatttgtaaattaaatttataaatatactctttcatcttttctaaattacttaattctattataataaatcattttgtctaatattccacacgataatccgtccataatcttacaattgttacataagatctacattaattatgtaaattacccagcctccataaatttcttttcttttcaataaaaatatagcagttaaaacaaattaactagcatttgttattcaatcagattttttatatatgaaattcataatatattgtggtttattcaatccctttgtttagtgacattaatgccaatttcattgaagcatatttttctgcttaatagaaccttttaagtttcatagataattattttgtttatttatgaaattgtaatgtaatacttcttattctccttataattgtttatgtagatttataatttatgcaaaagaaactaaatatagcatggtataaggatttctcctgaattatgtctaacactattatattttagtgccattttcccaccattatcagaaggttgactccatgcaataaattgtttatctacaatctttccaaaaattgtgttttgcctcgcagcatttaataattttgttgcaattccattcaatctttgagatttgcaaacccatattctcgatatacctaatataaactgtggtcttgactgttgaacaatgactttgtttttatatatcatccaacgtcctctatccttctctaacatttcaatggtaacagcacctacagcttttccattcttcacataaataaatgcttttcctgtaccattttcttgagaccaaaaggaattttcatcatgaggtgcatttaattcattatttactagtgtcatgatatctaatgttgcattaacttcggcactatgatttggccttaccataacaatcctttcatcattggtaaaacaactatcttgcgataacaaaggtgttgacaataatccatctaccgaatcctccactaaataaacttgttgtccccaattagtcgaccattttcttccatttatccttaaatcatgaaacttgtcatgcatcataatatcttcatgcgattgattggaatatgtcattccacattttgtacattctataactttatttggatttttacttggaaatgctaatttggcttgaaaaaatctagatttgttatttattttagccctgatactttttccatttccagttttttgttttcgatttgtgtttttctccaacaccataatttgaatctgtaaggtgataacaacttcctattggcccttttttgaataatttattttttacctctatagtgtattattgtatcataatattgatcgttattattagcatgttgtttcaaacaaaacaaaaactgtgcctacagaagcttggtcttcatctatacaaaactaaaaaaaatatgatataatgtatatatatctatatataagttactacaatttatcaaaaaccgtccgaaatgtctaatggtcaaatttttgatatatatatatatatatatatatacataatataaagatcattatattgaagcagtaatggtttttttttttgtagaaattgcacaaagatccggcttacttatttttttttttccgaaaattatataataatattttagaaaatcttcctatcagatgagtcatttaaagattataattgttcgaaaagattacaaactttaacaatgtcaattaacaaaggaaaatatctatattgcaagcaaaaaaatgaatttttgttagtagttgttaagaaaaagaaaaacactgatcttttccaagtaagtaaatagtttattttatggctttagctgtttttaacaaaggaaaagacttgttgttgaatatagtcgagatattgtgtataaaaaggcaagagtggtagagaacaagaaaagcaaagatgtattcccatcattcacattcaggaagttactgtcaacatggaagcagtcccttagaatccatgattgaacaggcagaaactttacaaatgaaattattttgtttaactgaacatataccaagaaagaatgcaaaatacttgtatccagaagaaaaaaacgattctactgatacggttaacttgactagattggaagatgatttcaccaattttgtgttacatgcacaaaaaatcaaaagggagagatctgatggacctactaaatatattattggtatggaaatagaaagttgtgacgatgatcaaataatgtatactaaggaaattatgaataaatatgaaggtattataaaattttgtgtgggatcagtacaccatgtcaatggaattcctattgattttgattcagatttttggaatttggctttaaaatcatgtgataataatataaagacctttttaataacatactttaacgatcagtataaaatgttacaggtcattcaacctttaattgtgggtcattttgatgtctacaaactttttttaccaaaggatttagaaattgattgtgaaagtggtgaagtagttgatcgaaatgtcaaagaccagtctttatccacgattcgtaatactaaaacaataaaagatattccgtcattaatcaatcattgggatgaggtgaaagatgtggttgttaggaatctaaaatttattagttcatatggtggtctattagagataaatacatctgcattgcgtaagaatctagaggaaccatacccagggaaggatatttgtgctttagcaaaagagtattctggatcgaaatttgtacttagtgatgattcgcattctgtatctcaagtagcaacatgttatcttaaagcattacattttattacggatattattcagttagagaaggtttactatttgaatgaaacagctgctggacatttggagattttacataggtcgattgaagaatttaagaatgacccgttctggttaaataaaaaattaacttaaacttatatcaatcatttgtatagctacaaacacagatttgaaaccatttatacatacatatatatgtatatatataatgtttaaagaaaatgattttatgacaaatggaatttaacctctgtctttgattcgttattattgaagtactgacgaaagaacaagaagatacggatagagaaatgtagtcatttacaataaaaacagagtttactaatattattttctatttaacctaaaatttagtagatagttattgcttacatctgtgatagtagtaactgcaataataatagttccacagatatagaatttattctactagtagtttgacataagaatcaaaatgatttataatacttgatttatttcttttcttcttttttcaccccgcccatcgcctttattattggttccttatgtttttgtattgtattctttccatctatctatccacgtatctatctatctatatatatatataaatgtgcatatatatgtatatatatatatcatgtactgggtgactgtaaaacaaaaaacaaaggaaaaaaataaaaaaataggtatccctttttttcttcctttcgtccagctttccttccattcaagcgaagcaaaacacaaaacacaaaacaatgaatgaaaactgaaaagtaagaggccaaaagctgttcgaggttttggttattgtagttgttgttttggctcgagggttgtttggacgtatttttcacatcccattgtttttccgccttcctcctccccttgtcttacaatcgttgttacccgttaacaccactgtactttgtttcaacacaaccactattgattgaacaaacgaatacatagaaaagcatatttcctccctcaactgaatctattcaatgacagtctccagtctcttttgcttcttttttatgggttctgttgatgttcaccaatgtgctagtttctgtccacattgctccccgaaactccgtggaatgagtactttcattccctttctcatttaataaaccattctccttaacttctaatcatggagtgataatatatatatatatcattatcatcatcagtatcttctttcacataacttcttgtaatgttttcttgttgtattaaagcacctcttcgagtctcatttattgtatcttcatcctcgcgcgtattcttccccaaataaaagaaaaggtgacaataaacaacaaccaaaaaaaaaagaaaagaaaagaagttaaaaattaatctagtactattacaaatggtcaagaaaaatttaaaaagtgttcaactgcaagtcactgtcgactccagcccgcaattcccaccttctactactactccaaaggatatcttaactaaggatgctttggaattcatcgttcttctacacagaacctttaacgaaagacgtaaagatctactaaacaaaagacagatcgtccaaaatggtttggattctggctcttataaattccatttccttgaagagacctcaaatattagaaatgacatctcttggaaaggcgctatcccagcccctggcctgatcgacaggtccacggaaatcaccggcccaccactaagaaacatgctgatcaacgcactgaactcagacgtcaaaacgtatatgactgatttcgaggattccctggctccaacctggaacaacatcatctatggccaagtgaatctctttgacgccatcaggaaccaaattaatttcgtttcttcaaaaggtaaagagtacagattgaacaacgatatctctgcactcccaactttgatcgtcagacctcgtggttggcatctcgtggaaaaacatttgttagtcgataatgaaccaatgagtgcctcaattttcgattttggtctatatttttttcataacgcccacaagttgcttgaaatcggcaaaggtccatatttctatttgcccaaaatggaacaccatcttgaagctaagttatggaacgatatcttctgtgtcgcacaagactacctaagcatcccacggggcaccgtcagagccaccgttctgatcgaaactctacctgccgctttccaaatggaggaaatcatcttccaactaagagaccactcaagtggtttgaactgtggccgttgggattacatcttctctaccatcaaaagattaagaaacttaccccaacatcttttaccggatagagaccaagtcactatgacctccccctttatggacgcctacgtcagattgttgattaacacatgccatcgtagaggtgtccacgctatgggtggtatggctgcccatatccccatcaaagacaatcctgaggctaatgaaattgcgatgagcaaagttcgtaacgacaagttgagagaactggccaagggacatgacggttcttggattgcccaccctgctttagcctcgatttgtaacgatgtgttcatcaacatgggaacaccgaaccaaatctataacatccccgatctttctgattttcgttcaagtgaattaaccaacactaacatcattgacggtaaaatcaccattgatggtattagacaaaatctggatattggattgcaatacatggaagcttggttaagaggctccggctgtgttccaatcaataatttaatggaggatgctgctactgcagaggtgtctcgttgccaattataccaatgggtaaaacatggtgccactttaagtgacactggcgaaagagtcactgctgaattaacttccaagatcttaaatgaacaagtggcaaaattgcaagcctctagtcccgttggtgacaagaataaatttgctgtagcagctaagtatttcttacctgagattataggtgaaaattttagtgaattcttaacttctttattgtatgatgaaattgtcaccatcacctcaaacagtaatgaatacatttctagcttaaatgaatcaagcaagttatgagatgtgaaagattataacatgttggatgttagtatgtctcaagtttatccattgatatatgtgtatatacatctatatttatatattcttttagtgcttattttttttttctcttttagtatttattttagcaacttcttcatctgcctgaaccaaaactgatataaaccctcacaaaaacgtacactacatcgctttattgaaacttaatatacatattaaagggtataattctttaactaatacacatatatatatacttattcatattatggcaaaagaaagactttctgaactatttatttggatataaagtacagaaaacaaaaccaaactttcctctacttaacaaaagtctttttattagttcctcataaagttctgttattagttaagaataaacaaataaacagtcaaacattatattcattaaactattatatacatacatacatatatatatatatatattaaataaacaaattatgacaataaatataacgctatcggagtatcataaaacgttagaatattatcaaaaatactattaaaatgtacctaatattatcaattatataattcactcttcaagaagtcttaaaagaacagcttgtacaagttctttagcattattattttcaaaaaattcatgttcaccgtccacaattttccattccttaacttttgtagaaatttttgtaagttgtctttgccaatctccccataatgaggattttttaatcatctcttttgaactgacaacacttaatttaacatttcttattttttcgttagattgcaaaatatctctataacttaataatgaacttgttaaagtttctgcaaattttgttcttaaaaacttaccttcatgtatcatgtctttaccaaccagtctttcgctcgacccacgacgtttgataagccatgaataatgcgaatctaacccaattgttgaccaaagtccatgccaccaaatcttataacctttcctcttcccaatctctttttcaataagtctaagacttaattgactatcactaagagaacctttatcgttcccatcatcatcatcacgaccatctccaggaaacaaccttgaaagatagtttttcttcagaagttcttcatgccaagattcgatcaacattaatccagaacataactccctattatcacccacaaaggttcttgcaacaagaccaccatagtcatatccaatgactaaaaagggaccattcagtttcatatcttccactaatgcataccttaacgcttcactcgaatccttaagagaccagggcatagaaacagaatcgctcaatccgtatcctactctatcatacatacaaatcctttcaacatgaccaagaagatataactcctcaagccatctaccagatttataagaagtttcttctccaccatgctcatagataataattggttgcgttgaatcaacattatctaatccataacatcttaaatgtatcgttcttctatgatcttggccaataaagaaataacgattaggtttattcatgttatgggtgtcaatagtgaaaagcaatgtatttaaagtattcaaaattagtagaagtagcagtataattttgcatgcatttcgaaaacctattattaaccattccttcatagtatgtctattttgattaaaaataccatttaattgattagcataaccctttaacttgtatgattgtattaaatttaaggcaaaagtcaatatcaaccaactaaaaacagtcaatgttagaccactcatcctatatcttgtatattgagtactagaaagtatcaaaatatcaattatgggaactacaaataacagggtattaattttacaatctattgtagaaagtaacccaatatcagtaaaccatacgttaaaacagttcccacttaaagctatcactaataaaacaaaattgtcaaacgactcatttctactagatggaggaaacaattcaacaaaaaactcactaacaagaacacaaacaaggaaaagaatattaataaatataactaagtgtaaaaaccacctccaattacgcaaaaacaataaatacttttgacgagtctccactctttcactctgcccggaatattgctcagaatcttcctctctctggttgatattatttctttcacctagtctattctgtgacacactattatacgaatcagaggctggtatcttagttcccagttgtctgtgcgattttccaggatgatttatttttgaactagaaattagcggttcagattcattttccaagttcgcatttgtatcaacttctggtgaatatcttcttgtatccaccaaattagttccatgcacaggaattgcttcatttggtggcattagaccattatcataacctcttgaattcattgaattttatctgcactttatttggagttttcaacctttatattttaataactatactataaaaataaaatatttggaccttttcgatggattttcacctatatccatatgtcttcaaaaatatttactctctaattctgttacaaaacaaatttttagttagtataaccaactttactcatgtgtctgtcttcctataggaagatgagtcgtgctcccttcaaaaaaaaaaggcaacagatatataaaaagttgtacaaacacacatatatacaaatgcacatacatatagacgtctaatatagggataagaaaccaaaagacgatagttatgtaaatttatgaatactaatgttcattaatattatgctgtcctattttatactgcatatagatatatagctggctcataagccaattttaagataccagatgtgcgattcttcaattatatttacatatatataaatatatatatacaatcatatatgcatgtatgtgtgtatgaacttacttgtttatacatatatttttaaaaataagaagtgtttcttataatgtatacatataatgagtaataaaaacctattccatatcagaaagattataaatgcaaaagttggtacttttctacctatttatcgtagtcaaccattttaaattggacagaaccttgtgatattatatttttcctatcgtctaatttcccggtactgttaatatcttgcttttctgtcgtcggtatattgtcgttcaatggctgagaatcttctttatacttacttttacctctacccctaatacctttattagaatttttataaacagatgcaaaataatctaataatgttttttcttcttctgatattgtttgagtagaatccagatctgccattcttttagtcaaatacattactgtctctaagtgaaatctgttttgatgtgatttcatgttacctaattgagtgaaagatttaaagcaattatccaatttacaaacatatggcttaacgtctctatgaatcaccctatgtgcatccaaattaccctttctagcaaatttcttatggcaaatatcacactcataaggtttttcgcctgtatgtaacctttgatgtgttcttaaattgccaccttgagtaaatcttttaccacaccaactacattcaaatggtttttctccacggtgtgatctcatatgtacttccaaatgggtcacttgaataaacttcttcttacatatcgaacattcatgttgtttaacaccgttgacacctattggtttctccacaccaccaactaaagtagctctatctgggataacaccagaatgctcacttaagatcaactcaccatcctttgttgtggtaattttttctgtaataccattctttctagcttcaaggataagcatcaactgatcaatttttgtagaacctaataattgtcttggatctttatcatccttcgataccggctttgataactgcaaaggtgatgaatggatcttaacagaattctcctgaaccaatgtatttgtgtttaaaatattatcagttttaccaattaaagcctttttagttgttgtttttgattttctaacttttttgattgtattattattattaccattctcagggctaaaatcttttccattctttatatttttatcatcactgctttttccatgaatcttactcttgtttacttgctcattctttttcatatcatttgagaaggataaatcactacttaatttaggatcagttatagaaatattattattgttattggtggtagtggtggtggcagtaccattattaaatgactgagtcaatactttgtttggatcattttcccaagtgtttgataaatccataacagaagagacccttgatagtccagacggatacaaaggtgcactttgttgatgaaggtatgggtgaatatttgacaattggcctgtagtgtgatttacaggtaagatctgtgatggcaaagttgtttgatggttgaaactattcattgtactgctaccaatagaatgaatactattatttctttgggtactcatgtttgaattgttaataatattagatggatgcgttgtatttggcagaggcagagtaggtacatccatcgaagttctaattgaagaatttcttgatctactaaagatgaaatcattaaaatcctctggaccattagtgtacttaattgaatcacgccttgaattatttataaacggatcaaactcaaaattagaaactgtactgggtaatctagataatatgccactagagtacatattattattattactattattaccattattggtattatttatggtagtactagcagttgtcgtagatgttgttgtgtttgttgaagacatactagtattattattagaattggcactgttttctgtggtggaagctggtacaattgtactaacactagatgatttaattgtattacttgttgatggcaacattgcaggtggtttcatattatattgtgataaattcttactacctaagacattgcctggcggatgtgcaatactagggtcaccaatagaagtatttgtattattactattattactattattactgttgttaattgcatcattctttttacttatttgataattcgtggttgatccagattgttgaaaataatccaattcattatgagtccccgtaattggatcgctagggttcaaatttgtgtttgaacttgtaggtgcaatttgtggagaaggtaaagaagagtcccttggttcaataagaatcgaatccctcttttgagaagaacctgctaatggttggaaagaatagccgttgctaatattaaaaccactacttggaagggtagttgcagtagttgtagttgtattaccagttgaaatggtagtagaaatggatgcggatccagaagtagatggtgctttggcagtagtggtgggcgtgcttgcgttagaaacaattcctgttggggttgttaccgttgaaacagaattacttccttgttgatataataaggggttgcttacattgatgccggcaccaattgaattaaaactttgagataaggaaggtaatttcttggtattattagaattagtcttattgttaatcatattttttggtttcgaatcttcatttgaatttgaacttagattagtatttgaatttagatttttatctatattagttgtatttgtgtctatggtgtttatagtagatttctcagattttgtatcggttaaaaatggtgttagggaggattcttgtgctaaagtgggaggaagatgactcaaagtcataaaatcaccgatggattctcttctaaaactattgatattatacctattggaatctatatttcttggtgacatatattaagaaagaaggagctaatgttttaaaaaactgatgatataaaaaattttctttcttgctctcttatattccgtataaaaaattgtcacaccaatttacagattgtttggttcagctaaattgataaaaaaacaaaaaataacagcgagtataagtaagagcagtattcaccttgtatagtagtatcgttcaatgcaatgtttatttacccaatcaagttcccattcactttcccaactgataaatttgtttcgattcttatcaacaagaaaaaagaaacgaaacagaaaaaaatttcttttttttttgctttttcttccaaaacggcaagttgtcatggaaacagatttttatttccgggtaatagactgaacaaacaacaaattttttttttcttttcaatgtagaaagaaccaaatcctcagagaaaatgaaataacaaaacaagattttaatagatcctgtgtcactgttcaaatgaattgttacaaacaagacagatttgttgaagctatttgattgaagatatattacctatacataactgcaaaaaaaaaaaaaaaagaaaagaaaagaaaactacaagtaaaagttatcgagatacaaaacataattattaaacaatgagtagtggtgttgtagacaaaaagaacaaaaaggaagatgaagatgttgtgatggaaggtggtgaatctacagctggtttgccttcacaaaaccagcatgttaaaacagaagaagaagaagaagaagaagaagaagaagaactagataaagaaaaaattagaattttacctcaagctacctcagaggatggtacatctgcatcattccagatttctaatgaagatcatacattaggtaatgctttacgttatatgattatgaagaatcctgaagtcgagttttgtggttattctataccacatccatctgaagactttttaaatcttagaatccaaacatatggtgatatcactgctgttgatgctttaaaaaaagggttgcaagatttaatggatttatgtgatgttgtagaagaaaaattcacacaaagaataagagagatgtaaaattataaataacgaataataacaataacaaccgcaatggccattgacttgctttatactaggtaatagcgaagaagactttttacttcatacactgcaatttctcatgtactatataatacgtataaatcattattaatacatacgataataataccaaaaatattgatcatatcataaatatgctacactacactgatgtattactatttcattcatttgattatgttattcagtgtggtgtacgggcgatgagcaaagaagaattatattttttcttttgtttctttattaaaagaaaaaaaaaatattcaaaaaagaaaattactgcaacaaaaaaataaaagaaaaattttttatttgttattttttcattatttatataaagagataccattgcttgaaatttgaagcttggtgattttgggtcttcttcaagattattgagtttatttagtgttttcctttttttattctattttcttgtttcattcatcatacaacacttacggttttattactgtgtatatttattgaaaagtcaagaataaaacaacaataagctatatatatacgtccgtacataaatatatacagattatagatcgatatgacttatcctagaaaccaacaatttaacagatctaattataatcatcgtggtggtgatttccgtggtggtagggcctctgacgctaattcctataatcaccgtggcaagggtttcggtggtggccgtggtgactacaattctagatcgtccaatttatctaaaccacaagaattggtaaaaccaaattgggacgttgaattaccaaacttaccaacatttgaaaaaaatttctatgttgaacatgagtccgttagaaatagatcagacaaagaaatcgaacaatttagaaaagaaaatgaaatgactgtatccggttctaatattcctaaaccaattacatcctttgatgaagctggattcccagattatgtgttaaaagaagttaaagctgaaggttttgaaaaacctaccggtattcaatgtcaaggttggccaatggctttgtctggtagagatatgatcggtattgctgctactgggtccggtaagactctatcctactgtttaccaggtattgttcatattaatgcgcaacctctattacagccaggtgatggtccaattgttttagtcttggctccaaccagagagttagctgttcaaattcaaaaggaatgttccaaatttggtcacagttctcgtatcagaaacacttgtgtttatggtggtgttcctcgtggtcaacaaataagagatttacatcgtggtgctgaaatcgtaattgccactccaggtagattaatcgatatgttagaattaggtaagactaatttgaagagagttacctatttagttcttgatgaagctgatagaatgttggatatggggttcgagccacaaattagaaagattgtcgaccaaattaggcctgatagacaaactttaatgtggtctgctacctggccaaaagaagttaagcaattagctgctgattatttgagtaatccaatccaagttcaaattggatctttagagttagctgcatcccataatattactcaattagttgaagtggttactgattttgaaaagagagatcgtctagttaagcatttggagactgcgtcacaagataaggaatctaagattttagtttttgcatctaccaagagaacctgtgacgatattaccaaatatttaagagaagatggttggccagctttagctattcatggtgataaagatcaaagagagcgtgactgggttttgaacgaatttagatccggaagatctccaattatggttgccactgatgttgcagctagaggtattggtatgttaactttttttttaatttttatgtgtgttactaacttttctttcatttgttttttcatctctattaaggacaatttattaaatgataaaatgataatattccaatttttaacaatgattaacgatacaattatgcacactctatgttggatacatatgatcctgcctaattttttttttattttttgtacagtgaggaaaatatgaatgaatattatatatgactatcatataactactatgactgaggagtacaactctgatgaggtagaatgcatttgatggaaagatgttgaatgacatggtgagtttattctcaagcatatctattttttgttttcatctattatttttattttttgaacggtgatattaaaggcaaataatatgagaatattgtaaatttatcagacaaataaatcatcatgtcgtattacagcaggtttcttttcaggtaatgcatttaaatattagaacttgatattgaaagaagttgattgtcgtttgaagcaaaatacaggtgaatatggcttctattattttatttgttttatgtgttttatatggtgataatatatcgaagattaatgctgcgggtggagaaagagaaaagcaaaaaataaatagaataatattatcgaaacgacgatgatcttttctttaacctctatagtagtttgaaataattgtaatttctgtttatattcattccttatctttctttttcctgtttttttttttttatttttatttttatgttattttattattgttacttgattgctgtttctttgatcgacaatctaaaatggacagttaataataataaaagattattaaaaataataggagggggtaagaatgaatatttattttacaaaaattagtctgtataatatttatctttatttttcgtaatagaaataaatattttttcccatcactgtataaattatagtattgcttctgattaagaagatatggtagaagagattacagtagaataggcaagaaatgtgttcaactatttttacatgagaaagatgataaaaatgaaagaaaagttgcagtgaaactatgatgtttttgtaaattaatttggtttatataataacatcataaaaatcaataaaaaaatacatgagagaaactgaatatactaacaaaataaacttttccttccaaatgttctaggtaagttctttattaatttattttatttgcatatttattgaatcagatgtcaaaggtattaatttcgttattaattatgatatgccaggtaacattgaagattatgttcatagaattggtagaactggtagagctggtgctaaaggtactgctatttctttcttcacagaagaaaacaaatcacttggtgctccattaatttctatcatgagagaagccaaacaaaatgttccagaggatttattgaaatatgataggagaccaagaggtccacatccaagatatggtggccgtggttacagtaatggtggttatcgtagaggtaactatggtggccgtggcggttatggtggttatagacaaagagattctggttgggctggcagacgttaaatctacagaaaaggaaaagctcaacatatatgtgtatatgtatttatatatctatccaaaacctgtatattagacttttttcacttattttatgatataaatcatttgtgttgatagaaaacaaaaaaaaaaaaacaagaaaataatgatggtaactttattattattaaaagtataaattgatagtaatctttataacaagacgtatgttaaatcaaacaaatatatataaaataaataaagaaataatatataagaaataaataatagttaaagaaatattgtaaactggtatttataattaaatataggtcatgtaatgcattatattagttgaaatatggatgtatattttgtatagatgctgttgttgtacatatacacattgcagcataatggaaatattttaatatgtgtatgttgtttctgtgtgcttttcttttgtttttgttttttgttttcagaaaatataaatgaaagagagaaaaaagtgcttcgcttgtttagttatttaaaacgtagtaaccaatgatcaaacaagcaatagataagaccatagcaaaagttggactaccttcggattttttgacagtttcagctggttgagtttccttcttagacaaaggtttactatttggatccatgtcaccaatgtatttaccttttaagattttcatagcatcatcagaatggccaatatctaagaaactttcagtagcatcaccaccagcattttcaaaaatgatttcttcaccacctgggtgttcatctaagaaattagttatatcgtagactttgccatcaatcactatccaagcatcttcaactttgttatgtttagcaacttcttcataagtgtatagagtgacagccatttttccttttttttttgtgtatatctaggttattcttttttttatttctatttattaaatccttgtttgtggtttcttgattctttggtgttgtgctgttgcaggaaaaggtttacgtaatctaaatcagaactacgggacgcaagaatacgtagcaagatcgagacagacaagtttaggtagtgtttaaatattaagcgaactcaaaataaagaagcaaaaattttcacattagttttaagtttctcgattcttttcttttctttttccgtgtttttagtttttttttttcttttttgctttctttctttatccatagatttcggaccgatacgatgagggaagatattattactatggtcgaaggtaacgggagagaaaaagaccaaaaagatagagatggagacggccacacacatacacgcagagtattacatactctgcctctctcattcatcatatacccttgtttgagaagtagtgtcatatccactataattaatgtttgtaattttctttgtttttgctcgacttcgggttttaacggagatttcgaaagaaaggagacagagagaaaagacgaagaataataaaatttccctccccctccatttttttttttttttttttcaattagtaaagttaaattcagtccgattcaattcgattttttcttttccctttttctttatacgagagcacaggaagaagaaatcctcgacgaaaaatacaagcaaaagacacaaagaaacaaacaaaaaaaagaaaaaataaaaaacgaaacaagatcaaatatgaaaataaacggagacaacaaagacgaacaaattggcggctttggggttgtgagaacaggaattccgtttaaatccggaaggaggggaagggcgaaggaattctttaatccacattccctatattattatgcgaaatcatataccaatctacgtaattgaagtttcttcctgtcatttaaatcgctatattttctgtagcaaaaggacaaatgcatatacatacttgtttttattttagcaggaagttaattgctctgatccttttttttttcttgttgataggagtgttaaaaaacaaaaaaacaacaaagatattctatatatactttgatatgtaatatacagctccgcaataaataaatatcggtctattctatggatcttcaataatacatttgtaagaaatacaacatgtaaaccatctactagtaaataagaacaaacgcaagcatgtgtgtgaaaaggaaaaaaaaacgaaacaatcactaggttttaagttttatcaaatattttacaatatacaacatatacaatatggaaaggttaacaatatttgtttttttttcttattttaattctaatttacccttattttttcgataatgtgcacttctttttttttttaccatttgaaatcaattccagatttctctaatttatccattctttctttatgtctgatatcagatgcctcttcaatctcctttttactctttttatatttattttcattaaatgatctcttcttgtatttataaagtttttcgatttttgaccccttctccattagacgaacctgtaataaatgtcccatcaacaaataattattcatagtctcttgtgcaatcttggcatcatctttattagcgaattctatgaacccataatgtctcgaattgcctgtcttcttatttctagctaatctaacttctttcaaatccccgaattgggagaaatatttacttaattccttctcatagaaaccatttggcaatctactaacataaatgattgaggaatattcatttgtattctttttgcccttaccattcaaattgttttcttgtgcttcatctttattttttttttttttcttgcttggatctagtttcttaattgtatgttgttgtgcattgacttcttcttctaaatcagataacccttccattatttcatcttctgaagatgaagatgacgatgaaaatgattcattatcactttcttctactttttgtacaggggttttttcttctttttcttgttttttgatattggtcaattttaccattttgctcttattcttgtaactattcagtctctggcttattcaattattgtgaacaatttgatctgtatctatataaaaatacactgtttttaattgttatagtgtataatgcacatttaacttcagtagcattttctttttctgtgagtatttacctcatcgctaaattttttatctttaagtcttttacaaattaaaaaaaaaaaaaattttctttacttttcaatcgtgatctacgaacatactttcaactatgccataaatgtgtatacataatctaataaaacagaaataccgtttatctataatgcctatacatatatatgtatataattgcttctaatatatccaactgccttatatcaatttcctattcaagcttacttttaacctcagcatttgacatctctatgttgttatgttttcttgattttatatcagcatctgacccagcttcccacctattcttgaaattccaattcatttcttcacctttggacaaaaatgaagtatttccattcattactaatttccattcactagaataaaaatcttcacttccaccatctttaatcagatcatatctatctagtgaacaactaccatttctgatcatagttcccttttcatcaattcccattcttgcattaggaaatttcaatagattcatccctaaagctgctttggtggctgcatgagttacaagtatgatactttcaaccttaggaaacttcttctctacatttttcataaaaattggccagaattctttacatcgattaaaaatatcctcttctgtttcaccttgcaaacttggcattttactgtcttcccatccttcagatatcagaccagggaaaaatttgctgattagtgtattatttgctggtatggggattacgtctctatccggtttaaaccattcacctaatcctctgtcgacgtataattctatgtttagtgcctttactgtaggttcgattgtctgtaaacaacgatagaatggtgatgtgaaggcaacattcggtttgattgctagagtctcaatgtatttacatagttcttctgcttgctccaaaccatgggctgctaatggaacatcattttcaatacctgttggtggttccgggtaaggaccagttggcagccagttggacctatagccatgtcttgcaatataaatggttttgacggtcatgctgtggttgtttgttatattctaatagctgtacctcttctactttcgtatacagctcttttggctttctttcatatgcactcactttactgagaaattgttttgttaaatataataaattccattatccaaatatttcacagctcgaagggttttagaaaaagaaataaaaataaatattcaaaagaaagtaaaaaaataaaaaaaaaaaaaaataagaacatcccttatgactcaaataagactaaaaaacagcatgatgtaaattttattcatgtaagacaactccatgctacgcaaatatatcttttgaaatattgaatttttaataaaataaaattgtatcatttaaatttctatccatatatactaacatgtctaaaggaagaaaaaaataaacgagaagaacaaagaaatacttatttctcgatatttatcttcttgagtgatgcctttttggtaggaacaggtggtgctaattttattttccccttcactaatagtggctcagatgaagaaagctgtaatacttcttgttgtatatcttttgtaggtgggttagttgatctaacttttcttggtgacgatgaatctacaaccatttccaacattgatgataattcatcatctgaatcatctattgcatggcccaacaataatgaatcttcatattcaaatgtatcatccgatgaattatcaggtattgaagaagtaattttacgacttggaggtaatgaaggcagtggttttttaactctatcattagaagtggtagatgtagaagattgattattcaagggtttcaattctactgggtctctagttgatcctatgtttgtggtacttttaatagacttagaagctcttgataagggtggtggtggtgacaccatggagttagttgttgacaatgattcattcgaattacttatcatatttttgtttaaatttgatttacagttaggagcaaaaaaatcagcacttatatgttttcctaaggcaagtccatctttcatttgattattcgaagctttaactttcttattcaagaaaatatctgatctaggggttaatccaactaaggatatatccttactctcatttataccttgtggtatttgtatgtttttgtgaatatttttcttttgatttttatagtctatttgcaattggttgattaaggataatttcttcgtatcatttataaaggcaatattgaccctatatgctgcaaacacaggtctgtgatcacttaactttaatggcgcatctgagtaagctaatggatgaagatttgatcctctatatatgattctatctgtccaagaaggtgttctcgctttttctgaggtatcatatagatctgtcccaacatcatacttgtaagttgggtggaattgtaaagttggttcacaaaaattcggaaatatttgtcctgcattcaatacttgtgttaactgatcatatcttaacaatgattcaatatagttaggttgctgttcagatagcttttttctaacattaaaattatctaagtctatcctatagttaaaatcaccaagccaaaaaatagagtcatgttgatcaatagttctcccaccagtgaaggaaatattcttactgatagacagataatcattggctctttcttcaatattgtttgcccctgcagataagtgggcattaacaaaacaaaatgaagtatcagaataattgaatctaattgcaactgcacctttgtttcctgtcatacctttaaacccagttttctttgttgagccttcgacttgtttcacatgattcattttatcttctttaacaaataaaagaataattaatgatgccatttgttcagccctgagtaaaacatagttttcttcatatttgtttaagcaatccatcacaaggttttcccaaagtgaatttttagaataatcgacattcaaaatggagcttgctgtcaactcgatcacttcttgtaaacctaacactacgatatctggtttaaatttatcaccgattggaaatagccactctgataaatctgcatgtttattacttctgcccccaacattataagtaccgacaaatagattcatgttagagaacgttgtaaattcttcagaaaatttatttaattcttctgttatatatgtattctccggatcaaatatttctactggtcgttgataagataatttacctaataacccatcaatattctgctgtttacccttatcaacaaaattatttaaatacaatctactaactgactttgtagcatctgatatagcccctgctagtgacatctttccctttcttgtaaaagaggattttagggcattagtacctgtatatatttgagagatttgatctccatgatctgcccaaagaatattatgtttttttatatattcagagttatcgctaattctactttgcgaaacaatgttaaaatctgtaagaaataattttaaaatctcatatgacaataattgttggactagatttgttctgtctaaacaatctaaacaatttgttctaaagcatccactttgttttgaaattattttattttctcttacatcaaacgaaaagtatccgttatttaatatagatgtttttataattggaattaattttcttgctgccaaaaaaccatcttgggatgtttctctatgaaaatcaaattctgtaagaagaacttgtttatctaatttaacacttttagatacagatagctgcctcctgtatcttttagtcaattcaaactcagaaggtttatctgataagaggttaacaatatgtatagtaccatatttagctgctaagtcttgaaaatgtaaatcaaaagcaccacgagtagcttctactgatctggttatttgaatttttggattaattaatgatgcatcctgttcccaaaacaatggaacactacctcttacttgtgtgtatgaataaccatattcattcgaatacaaaataaattcattttcaacaaaatttgccacgtgtccatcgtcatctatgccacgtacgttatatcgtgtacctgctcttttccaactttgtttagatattatggtcattgaaactttccaatcttgaatataagttattactgtctctgcaaagcctcttataatagtagttaaaaatctatttttatctaaaattctctgtgtagatttatcagccctgtctctatagagcattatttcccttaacataaaattattccacataaattcttctctacaacattcggtggaactaatattatcagtgcccgtttcattatccacatgcttctttttactattaatcaatcctcggtcttgtaatattgatgttatatcgaaatctgcactataaaaaaatgaaccattagataacaattttttgtattgataacaggggtgttgttgcagtggtatagaattagaataagctgacctgtctaaatcataaccttcaatattggttttataggtgtcattatcactttcattgccatggttgttgaattgttggtctaatggtcttccctgtgaatccaaatctataaaatcccatctagaatccgttagacaatgaaaatcaacagcatagattttatttactgtttctccaggtataggcgatgccacttttgaggcacctgttattgtaccaataaaaatattgttgtcaacttcaatcaatccaataaacccaaatatttcacgatacgttaatctcttgtacccttgatttttcaattcctctcttggcaccaaagtcaatgaacatgattttgatctggtgtcaaaaccgtttatagcttggaaaatcaatgcatgtgattcggatactaatgcaattcttttatcttctgaatgtctattcgatacatataacctcatttagggaaagatgaaaatagatgtcgatgaaacaaaaattaaataggaattagaagctagtttcttctcaatgtggtgttttgtaaatcactcaaggcgtttggacgattgtgataatagagataagaacaattaaatgagtgtagaaagtatctttcaaagtaagtctgagtattgtatatacgtactttgtcacctaatgtaaaacttttgtgtagcagacttcttcactcttcctatttgttttctttatttttaaagatattatgaatcatggttaaaaaagaaaatggaaggatttttgtaaaatagtaaaaaaatcacaagagatcttaccaaatcagaaaattgtcgcagatatgaaaaaaaaggagtcaaaggcagttgcagaaagtgggaagaaggtatagagagggtataataaaaagtaaacaggataaaacgcaggtattcataccataaatacgtaaacgtgatgattatttttgatgaatggattgatagtggtacataaaattttaatatcttctttttctaataattgtcttttttttcttctatttcttttattttgagatatgtataagtataagtatatatatatatatatgtatgtatgtatgtatgtgtgtatatgtataaggatatgaataatagtgtatttattattacttagttaaaggaagatgggatagagacttcgccggatttaattgcgttgttaatagaggagaaaatagctcttacggatgcatcagagacatcctcagcaacaccgataccccattggtagcacttctcgttatcagattcacgtttgtaagttagattgacgtaagaagcggcttgagtggaggaaccagaacctaaggcatgttcagtgtaattggagacagcgaacctgcagttcaataatttggagacagcatcaactagggacgaaattggaccattaccagtaccttttatagcatgttctttaccattaattttaactttaccggttaagattctgcgttcgtttccatgtttaacgacatcatagtcgatcagtttaatagtgttggcatactcgttgttgtagttgtaatgttctcttaggacgtttgtaatttcttcggcctttaattctctgcctagcttatcagcattgctttgaacgacgttggagaattcgatttgcattggtcttggaagatctagaccaagagatctcaaaatgacccaagcagcaccacctttaccggattgagagttgactctaatgacagcttcatagtctctgccgatatcctttggatccaatggtaagtaaggcattctccagaaatcgtttgagacaccattagctttattcttttcacgtaatgcgaaacctttcttgatagcgtcttggtgtgaaccagagaaagcggaaaccactagatcaccaccgtatggagctctctgtggtacagggattttattacaacgttccacgacctctttgattgtggtcatatcggagaaatccagttttggagagaccccctgggtgtacatatttagggcaacggtgacgatatctacgttacccgtacgttcaccattgccaaagatacaaccttcgacacggtctgcaccagccaataaacctagttcggtggctgctacagcacagcctctgtcgttatgggtgtgcgttgagatgcaaactttttcacgttcagtgatattgttggcgaaatattcgatttgatcagcatagacgtttggagtggccacttccacggtggcaggtaaattgaaaatgattgggttatccacggtaggttcccaagcggccttgacggcttcacaaattttgactgcgaaatctgttggtgtatcactgaaacattctggagagaactcgtaggaccagatagtagactgttggttaggatcgtccttggttaactttctgacaagcttggttgcctcaacagctttttcaatggcttcctcctgtgacatgttgaagactatttctctgaacatgtcgcttgtggccaagtatgtgtgaatggtggctctcttggcaccactcaaggcttctaccgttcttctaatcagatgttcacgtgactgtaccagtgcttggatggtgacatcgtctggagcgttttccacagcgtaccgtgtgaaatcgaagtcggtttgtgaggcagaggggaaggccacttctatttctttgaagcccatggagatcagtttatggaaatactctttcttttgttctacagacattgggtcaggcagagactggttaccgtctcttagatctgtggaaagccaacggggcggtttagtgattctgttgtttggccattttctgttttggatgtttggagatatgaaaggtttatattttttggatgggtcttttaacatgtttttgaaggatggtttgaaaggagggatggatcttgaggatcttgtgagatgctctgctagagcgatgatagtttgctttaccatagttttttatgttatgttatattatattgtgttgtgttgtgttatgttaggttatgtaagatctgatatgagatgtgataatgcaacgaaaatatttcagtttgtttatatgttatgctatgttatgctgagctatgttatgttatattttattattattattattattattattattattattattattattattattattattatttatttcatagagggaagtaagcttaataaaaggtgaataagaaaaaaagaaaaaagaaaaaagcaggaacctgctcgagggaagaaagttaagagagaagaaatggaacgaaagacataatctagatatatatgttttaactttttataatcttgaaagacaaagagaagggaaagagaggaaaaaagattatgtgatagtaatagtaatagtagtagtagtagtaatagtagtaaaagtaattgaagacaaagatttgatttcaagaacaagtgagtcatacaggccggcacagggataattagaaattctactaagaaagatggagagaacgactatatagaatgcggatgcggatgtggagtggacaccgaagaaataaaaaaagataaaataaaaaaaagatttgttgttgttttctgtttggattttaactccgtctcttgctggctttgaggaacactggactttggttttgaattgtgagagatttgtgactgactcatccatccatccatcgatccggtggttggggagggtaacgcgacttcctttctccttgttttgcggtcagacaaagaataaatgtaatatatgcgagatagaatgacgtatcttcggcaaccaaaagagagaaagagtaggaaaaaaaataaaacaaaaaaagaaagtcttccttccggtaccgctcaagcaaaaacaaaacaaggattaaaggactaaaaggcaacaacgaaaaatattaccctgtggctgttgttgcacccacacacccacgtcatctatataatattttcttgttgagtaaaatagaagggagaaaaggggagaagccactatctccattgtcatcgccaccgccatcgccgttgctgtgatttgtgatttatgattcgttggtccgtgttgttcacgggaaatttcttttttcttttttcttttttcttttttatttctccttttttcacacagtttgttttattttcttgtttttattctttttttttttttttatcacctgttaaatattgaaagtgtgtgtgttttgtgatcaactttactgaaaactgtgtaaaaacttgtatacaacaactgtgtacattctgtttgtttatattatgtgttttgacatcggccttctttttttttttttttttttatttactagtcctaatgcattatattttgtcacatttggattataaacagatttatccttcaagctattaatttaataatatattaagatcagtggaataataaaaataaaaataaaagatatacagaaagagcacgagagtgaaaataaaagtgacaaagatctttagatttgatattgttacatcacattaggcaaaccaattcgtattaatactatctattcaatcaattaaatttaatccttgtcgattatacatacatttcccttttttttttttcttttgtgttttttttttttgggtctttcgtttcgtttcgttttgttttgttttgttttgattaaaatatgagtcaggattataggaaaaattatgtttctttatatggtaactctgatgatgaggaggaggatggggtagatgatcatattcatggtaataaactggatttagtagataaattaaaatttaatatcaatacagatacagatacagatactaatactaatactaataataatagtgttaaagatatccatgataaagataaaaatagaaataagaataaggataaatctatcttatcaatgaataataataataataataataataataataataatgactttacttcaaatattttattagaacaattagcatacgtcgataatttcttaccaaacgttaatcatgattttatgaatttaaatagttggatactaaatgaaaataatcaaagaaatactcatataaagtttgataataatggtaatagtaataatgatatatctgataattttaatactaataatacttcctcaccatcctctatctttattaataacccatttatgttggatgaacagttggctgctgaattaagtgcttttgccgatgatgtctttatatttcctgatgaagataaaccaaaattaaataacaataataataataacggtgatagtgatgatgataagattaataatattaatagtgctaatataaatgaaaatattcaaaataacattaatagtaatagtagtagtagtagtaagaattataataataataataataataataataataataataataataataataataataataataataaaaattctcattatttatcacagagaagaaatacgtttctaacttcacagtatgattattctaaatcaaggtgctcttcgaaaaaggataataagttaatatcaaataatagtaataatagtagtagtaataataacagtaataataacaatacagacattgaagtatctacattttctccagaagttacttctactacagttaatcagcataccgataataatgctaatataacaaatactcagcatattgcaagtactagtaaccttacaaatcaaatttcttcaacctctgtacctttatcaataacagaaaaaaaaaaagaaacagaaatagaaatagaaatagaaacaacaacaacaataaatgataataataataataataataataataataataataataataataataataataataataataataataatacaatttcacaaattcaagtgcctgactattctaaaatgtctactgaatttttggtcacattattgcctcgtgtaacaataccacaatctgtgaatgatttattaattaaatctggacttactaatgatcaaattatctctttatctgcaattatggcgtatcatcaacaacattttaacaacagtaatagatttccagttaaaaattatgataggacaaaactgctaaataaaataaatcaattgcatgatacaaatccaattaaatcatgctctattatactgttacatttggcagacagcatcaaatcacaaaataataaacatgtatccaatttgaaagatgctcgtagtcattccagtaaagatgaaattatgtcattaatcgaagcaagtaataaggaggttaatgaactaaaagctaaattggacaaaaaaattatcaagactcagaagctaaaacaggaaatgaataatttaacagaaaaaaatgttgtggatcattctatcgatagtaattatcttcctaacaataacgtatatattccagattttaaaccattattccataatcttgatcataatagaaccactcaaactgatgtcctcactaccagcaaatcacagaataataagaaaagatcatcacctcagctaggtattgctcataatgagagcgatgacaataaattatctcaaatagattctaacaaaaagcaaaaaaagcaaaaagaattggagaataccattcagcaattgggtaatttagcaaattcactacaaagtagaatccaatcattagaatcagagaacgagctgctaaaagaatttttaataagtttcactggtgagattggtggcgctgaaaagatggagtcaattaaacaaaaactcctgaaaaaaattcaaaaggattaatttatatgctttcttttttttctgttatattcttttataatcttaggcttatagattttatatgaaaataaataatatttcaaattctttctgggaacaaataaattgttatgttggatttaattgtgaataacagataaataaaaatgtttacttattcagcattgattgtaaaattgcaatttacctgttaggactatttattgtagtagatgttgagaggaatattacgttggtaaaaaatgaatgaaacaaaacgaattatgtgtagcaattcttaataggagggattttaacaatattagtatatatatatgtatatatatgcatatcaataatataaagcaataacaaaaaaaagaaatttttcagtcatataatactacagtatgtaataatggggcatatttttttcttttgtattatgtaagagttgttgtatgtaaagggatgaatcatatcaattagtataagcataaacactcttacgtaagctctatatatcactaattaataaccctggtgtagtattattacttcttgttgttgttcttgtgtgacattaagaagtaactcttaatatcattactaagatgtatttaaataagatgattacccctggcatatctctcaataatcaaaggcctcttgataagatttgatataattaccactccctggaaattctccaatcagatttaataccttatacgagccactgcgcacatggctgtaccaatcctccatccagacacttaggtgttaccctcggaattgcgtatctattggattttcagttaggttccttacactgtatttcctataccagttttttatatatttttgaaaaaggcctgtatttgaaaaaaatatatatcatcattttgcattcatgttttactaaaaatctttttcaaaaatatataaataaagtttagtgtaaggagccttaactggaaatcctgaaatacgtagtctgcgggtaacgcctaatgtcgaggcgaaggacttggaacaaccgaaactctgggctcaaggttctgagtgtattcgaacgaacatatgatcatcggatggacattggtggcaaattattaagaagcttacttaagagacccttgattattgagagatagtgccagagataattatcagcattaatattcataatctatctaataggttaagaagaacaagacaaatatccaagactaatctatttaatagttagaattaaccaattatataatttataagtgtttatatatatgattaatatccatattttagtatattactcgagataacccttacatttggtaatagtctagaatacacagtataatttatacaatcatcatctgaataataattgttgtaaatttaattcatttttccaaactgttgtataattatatgttaataactattatcaattcttttagtcaactgtaataatagtgattttttcttttgcaaaaaaaagttgtgaacatttgtcaatataaatttttaaattgatttcttattttctagtgtatatccgaattttataatagagtattttttattttgctttaccataaaaataatgcaaattaacaagaatttaaatgctagttaattaaggtctacaaaaagttaaatagagctgtaagaaattccaattcagtttggaaataaattaccatttttccaaaacagataagaagaaacataacaattaaccacaatgtgacagtcaattgttcaagatgttccggtttcggtattaacaaattattagttcatatttgaatcattaaatgtggtcgtttgaaaataaaagtttaatactgtcatttccgtaagaattattttttaattagttttctgtatgctatgtggtgggcagatgtaccacaatattggaaagacactttatttttcaccaaatatgtttttcacagctttgaagaaaaatgaaaatcttaaaagaaaacttgaaataaatataaaaatgtatactgtacacactatataataagtatatacatgtagttagtacacaataaaacaagcatctataacttaatgatgtctgccattaccatggatgctgaggactccaaattccaacaagattgatacattaaaggattagtaatccaaaccctaaaatttattacattatgttggaaaatgagagtttattactgtcattttcataagaattatttttaattagtttttctatatattatgtggtgtacggatgtacataatatcaggaaaacattttaattgtcaccaaatatgtctttcgaagatttgaaaagaaatgaaaaactttaaaagaaaacttaaagtaaataaaagaatgtatactgaatacactatataataaatatctacaggtatttaatacaaaaatgttggaaaatgagagtttattactgtcattttcataagaattatttttaattagtttttctatatattatgtggtgtacggatgtacataatatcaggaaaacattttaattgtcaccaaatatgtctttcgaagatttgaaaagaaatgaaaaactttaaaagaaaacttaaagtaaataaaagaatgtatactgaatacactatataataaatatgtacaggtatttaatacaaaaacataacaagtatctataacttaatgatgtctatcattaccatggacgcagaaggctccaaattccaacaaaaaacataacaagtatctataacttaatgatgtctatcattaccatggacgcagaaggctccaaattccaacacattaatttaggtgcactagtggattagaactgcaccccaattctctaatcatggtaattagtaatacacgtgggacttattaaaacaataggtaaattctagatttgccaaaatcttatgtaatctaatctttttattatgcagcatctaatgttgtagcatgggtttggcttattaatacaataattagttctaggttcattcaggatcttatgtaatcttgatggttataactatcctattccacaacgaagaataggagatttgcttctatggccaagttggtaaggcgccacactagtaatgtggagatcatcggttcgaatccgattggaagcaaaactttttgcttctgtatgtaataaccctgaggttatgtgtttctgataacagtagttctgattgaaatctcaataatatttcacttggatagatataagaatagactctttctatatctctagctgtaatattcctatatatatatatatctatatatccttaatctaagttaacctaatagtatacacttatatactatctctaaacctaggtagtccttggttcctttttcttcttcttcttggttgctctcttgtacttatgtgggttactcctgtttttatgtgtgtttgtaaaattttgcaaaaaggaaagtttagaaaaatatcgtcaaccctcatttttctaaacaagccctaacagtaatatcagggatattacacatattataattgcaaaaataaatgctctgggggaggttcgaactctcgaccttcagattatgagactgacgctcttcctactgagctaccaaagctgcactaattattgttgtggaatagaatagttataaccatcaagattacataagatcctgaatgaatctagaaccaattagtgtattaataagccatacatgtgctacaacattagatgctgcataataaaaagattggattacataagatcttggcaaatctagaatttacctattgttttattaagtcccacgtgtattactaatcaccatgattagagaattgggatgcagttctaatccagtagtgcacctaaattaatataataaattttagggtttgaatcagtcaagtcattaatgtagtaatctgaataatcgatcgagctccagaaaacatataaaaggacaacgttttcaggagataaaagatcatcttccataatcgtttcttgtaaataatttatatattatgtataaacaaaatagaacaagcaagtaacaagtcaagtaacttcgaataagtacattagctcgatataagccgcttaatatataagaccgttttagtaattatactatcgactatagttgattactgtctcgattatttgaattactattaatattatttgcgcttccctggaatacacaaagaacttcaccacaccatactacaacaactggtagcgtttatttcatcatgtcctcgaataatttaaatatgaacgaatttttagacgctattgatgcatctacggctacagaacatcataccaccgcaccaaccactactcctgctccaactactaacctaaccgctgaccctacttctgctcctgctccagtcccatccgattccaaatactacagtactgctccaatgcgcttctctggtcgctatgatttatttaaactaccagatttccttgttactgtcgaagcacaactttatgctcgaaacctccaaacagatgtggatcgtatagctttttttggccgaaacttaactggacccgctgctcaatggtatgtccaatggatccgtaatcatgaccaacattcctatgaacaattccttgtggattttaaaaataagtttattggtatgatcgaccctcatgccatcctcaatgcgttccaacgcttgaaggaagctaccgttggcattgacgcttataatcaaaagttttcacaactattagctttgatgccttcaaacatttggactcccaagggagaattacttttttattatcgcggtcttactcctgatactgcccgtatggtagctctagctcgccctaccactgttgatgctgctatggaagctgccagtgaaacagtttccatcaccaaccgttcatttcctaccttcaccacctatgatatggatggagacatccatatgaccgctgctcttaacccagtccctatggactctactactgatcatcatcctcaagttgctgctgtttatcgttcacacggaagagggggcagaaagggaaatcacaaatcttcccaagcaaacaaacaaccaattaagcgtccctctcgtcaatattgtattgatcatggtttatgtttctattgttacaagccattacaccgctacagtgactgccctaaccgtaaggcgagcagtcccaaatgaaaaacaattctacaacaacaccgtcacactagctcccatcgtgtccgctccccatccactcgtaggcaacagttgccaaattaaaatgtttattaaagaaaaacctgtcaatgttttagtggatactggttcccccacatcatttattagagccgatattgctgacaacctcaagttaacacgttctaccgctccgccattccgttttagaggtgttgtatcatccgaatcgtcatacactaacgaatccaccgaaattttacttgaactcgatgacataaaaattaaaacacccgtatacataactgatgctattacttttgaaatcataataggacacccgattatatcatctcacccgctgctccacaagatattaaataacaagaaaccggtccctgaatacattgtatccgtacttaccgagaatgataccgaagaattagatgttgaaaatgctgctgctgtgtttgctataaagatttctgaaacagatacagatgatcgatttgataaactacctcgctggttaaaagagaaatattctgctacagtccgcgatgatttaccacctaagaaattcgctgaacctccaaaggttgaacacgagatcgaaattaagccgggtgcacgcctgcctagaagacagccatatcagacgacaccaaaaatagaacaagagataaacctgatcgttgccgaccttctcgaaaagaaattcattgtaccctccaagtcaccctgtagttcaccagtggttctagttaaaaagaaagatggtacatatcgtttatgtgtggactacagagctctaaatactgtgacaatcaaagacccgtttccattacctagaatcgacaacctattggccaagattggctcttcaaccattttttcaactttggacctccactcagggtatcaccaaatacctatgaaaatggacgatcgtttcaaaaccgcttttgttactcctaatggaaagtatgaatataccgtcatgccgtttggtctcgttaatgctccaagcacgtttgctcgttatatggctgatttatttagggacttaccatatgtctgtgtttacctcgacgatattttaattcactcccgttccgttgatgaacattggaaacatatagacatcgtattgcaaaggttaactcaagaaggattaattgtaaaaaagaaaaaatgtaactttgccgctaaatctgttgaatttttgggatacactatctctgctaataaaatccaaccgttgatctcgaaatgtgcagctatagaacaatttcccactcccagaacaattaaagaagctcaaagatttttgggtatgataaactattatagacgctttataccccgctgctctcacatccaacaaccgattcaggattacatacatggtaaaagtaagtggtcgacggatcaagatgagagctttaacacattaaagtcacacctaatctcaaacccaatattagtctcctttaaacacgatggtcattacagattaacaaccgacgcttcaaagaatggattaggtgctgtactcgaagaagtgaatgagcaaggaaaaattctcggggtcgtgggttatttttcaaaaactttacaaggcgctcaaaaaaattactctgctggagatcttgaactcctagccattgtcgaagccttatcacattttaaatatatgcttcatggcatgcattttatattgagaacagaccatattagtttactaacggcacaaaagaacaaagaaccctctcgtagagtaattaaatggttaaatgaattagccgaatatgattttaaactagaatacttagcaggtccaaagaatgtagtagctgatgctatttccagagcagattacaatattgctgctattgaagatgctgccgtcacattagatccgaaaaattggtacgaagaatacctagctgacccattatgtgctgcctgttttgtttatattaccaaacttgatacaaaagacttacccatttgcaactcatcattgttcaagaaatatatgaagaaattgaacttatcaagaacctttcgccattgttttacaattaatgacaatattatttactttaaagaacgctatgttgttcccgacgctaaacgaaatgaagtccttcgaatatatcacgaccatggcctttatggtggtcatttcggttcaaccgttacatacaataaaattgcaagtcgttattattggccaaaattacaccactctgttaatgaatatgtctcttcctgtatacaatgccagttgattaaatctcatcgccctaatagacagggcttattgatgccttctgaagttcccgaaggtcgatggttaaatattagcatagattttgtatctggtttacctaaatcagaacaaggtaacgacatgattatggttgtagtcgacatgttttcaaaaagaactcacttaattgctggtagttacccatttgatactacttccgttattaatgctttattccgttatattttcgcttaccatggatttccatattccattacttcagatagagaccctcgttttacctctgcagaataccaagaaatggcaaaaaggttgaatataaaattgaaaatgtccacagcaaatcacccacaaacagatggtcaaactgaacgtacaatacagatccttaataggttattaaagacttatactggtaacaatcatagacaatgggatcgtttacttcctcacatcgaattcgtctataactctactcccaatcgcgtaaccaagacagctccttttgaagtagatattggatacatccctaatgaaccaatcatagttacaggagatgctgtttcttcccgtcatgattcaacacaagaactagccacaaagttgaaagcacttactttacgcacaaaagatttcttaactgagaatcagatcaacatggaagttacacataacaaagggaggaaggaagttacctttgaaattggtgattttgtactgctacatcgtgatgcttattttaagagaggtcaatatctaaagctacaacccatatacgttggcccatttaaggtagttaagaaaataaatgacaatgcttacgaattagatttaccttcgatgaaaaagactcacagagttattaatgttgaaaaactaaaaccgttaaaacgtagaaaagaccgctatccaaaagatccgcctaatactgctgccgaaaggaaattaagagtacatgaaattattaatgtagtcggttacgataaagataacaaagtgttttattgtcatatggaagatgttgatccgactattacagtagaatatccagtagaagaatttaacttactcccaacaaatattggtcaatctttaattgacaatttcgtacaattatggaaacaaggttcccaagagagagaggaagatgttgtggaatagaatagttataaccatcaagattacataagatcctgaatgaatctagaaccaattagtgtattaataagccatacatgtgctacaacattagatgctgcataataaaaagattggattacataagatcttggcaaatctagaatttacctattgttttattaagtcccacgtgtattactaatcaccatgattagagaattgggatgcagttctaatccagtagtgcacctaaattaatataataaattttagggtttgaatcagtcaagtcattaatgtagtaatctgaataatcgatcgagctccagaaaacatataaaaggacaacgttttcaggagataaaagatcatcttccataatcgtttcttgtaaataatttatatattatgtataaacaaaaaagaaacaagcaagtaacaagtcaagtaacttcgaataagtacattagctcgatataagccgcttaatatataagaccgttttagtaattatactatcgactatagttgattactgtctcgattatttgaattactattaatattatttgcgcttccctggaatacacaaagaacttcaccacaccatactacaacaattatacacatcgctgtaatataatataattagaattttgtgttattcggggaagcactagaaatatcaaacggataatctattaataatcgagacaataattgatacaatcggtaatgcaattattaatacggtcttatatattaacggctatgtcgagcttatataattatactatttacttattgtattttccgttggatgttcgttggttgttttgttttatatataatatatttaaattatgtgtaagagaggagtgatagaagatagttccatctacagaaaacgttgtccttttatatatttctggaactcgatcaactattcaacttgatatattaatggattagtagtccatatctttattattagttacaataatataatcgaagatcatagaacatttaggacaataggttatggtggcgtagtagaactataatgaacacggtatacataaacataatatgttatggtggcgcagtaacaaagatatgtaaacacgctgtacactaggtggcaaatggacacgttgttcttaaaacacaatagatcactctagattcagatagaatcttacgtaatctcggtggcgttgcctctttattatacaatacacactccgtgattagtgtttaatataatttatattaagcatactataatttattaaatttatttattttatttattggttgattgcctgattaattgttattatatataatactagatactgctgaactttagagaattcagttttcatattaaaggtaatgttggaatttggagccctcagcgtccgtggtaatggaagacatcattaagttatatatgcttgttatttttatcttaaatttatgtgtatattaattataaagtatacatagtagaaatacttgtatttatttcaaatattagtttaagtctttcattttttttcaaatctctgaaaaacatatttgctgaaaaataaagtgtctttctaatattatggtacatctgttcaccgcatatcatacagaaaagctaattaaaaaataattcttatgaaaatgacagtaataaactctcattttccaacaatcttttttggcactgtaaacagtatagtggttaaaattgactattagttcatctccagttattaagcaaaccatctatatatatttatctcatatgtttgttaaaaactattatattctaagttcgttgttcagactggaaacgcattagtagacttatcgatttatttattttttagtcttgatacatattttgcaattatcaattatctctctgttcatgattatttgatcatgtatgattttattatagacgtggattataaattgcaccaacttccaaacagagaaatgatacattttcaaaaacactctgaatttataatagtaattttaattttagcgagtatatatattctaacgtttgtacatttatattatcttgataatgtgagatgtataaaatttcaaaaaaaaataaaaagaagaagaataaagaatgaactagtactcactaatcaaaaaaccgcatacatttattttttctatacgattcagtaaacaaaaaaatcttagttgtgaataacaaacattggaaatttacaactttccacaggcatcaatgctcatattttgtaggataattatttatatattttatatattggtaagacttaagtttaatattacccatatttattcttcatttttgtacttcttcgaattgaaatcaaactacaatcacaaagtttgttaagcacaggtgtatttaattaaaaaagcaatcggtgttctaagatatcacaataaaacataattgattaaaatcagacggaaataaaatgggaagggtcatatagagttatagaatgaatttttatataatagaatgagccttctccaaaaaaattggcatctggaaaggggttcctaagcgtattttcttccctcttgttcgcagattttaaaaagtcattatactaggacttgcaatttcctgatataatcgtttcaagaccattccaaataatatttgatctaataatttgcaaatcggaaatcagcgcatcattaaaaactcaaataagcatgaacaatgtctgtttattcatataatttctatgcacccataaattattattagttgcttttgaaacactttttcatgctttataaaatttcaaattgacttataagtgactattaatattcgaattttatacagcaaaaacacaaatagtatccaaacaactattaatgaataaattttccatatttgatataatttctgtgtaagttatacaaccattaatcaattcaccataaaacaattttttttactgtaaaattctgacctcttctattttttttaatataagaatgtttatactatttttgaataaaaacatatatatcgaataagcaaacaaagttcaaacatgatcgatattataaggaaattgttaaaaaaagaaaaagcaaaagacatattgacatgtactttaaatctctttttttcatagttcgttggttttcttcaattaaaaaaattaatatttataactgacttgtgcaccaatcttgtgattgccggtagaaaaacttctgaattgcataacctctccattttcaatttctttgccatctgaatctccccattccattggcactctagcgtatgcatctgtatatgctaacacattaaacgtataacgccctttattggatagatcaggtaagaacgtaacactagcagtaatttgtctaattaatgctcgaatctctttttgaatctcttcttttgatagtttagattctgattgactatgattattttcattttcattattttcaacagatattctttcaatatcaaatgcccaacgttccaccacttcaccttcatccttatccacaatacaaataactaatttgttacatttacctccaagcatccatttgtgaacttgtcctaaaatcctacgaatatatgatttcaattcatcatcatgcgtcttcattaatgttagatcatactttttgacagtaccaaaatcttcttcaggatatacacctctctgataaagaatagaattaacacaatattcaaaaaactctgttattattcttgtggaaccttttaaagcaattgaggaattcattgtgtatctttgtttgtaataaaaataaaggaaagtatactaaattacaaaataaaaaatataaggacaaatataactagatatgattgatatatgtgttttgaattatagtggccacctgtgatgattagctgttttaattggatttttttctctttaatgagtgctaactgtaattcatatacaaatatctaaacttttctgttttgatttttttatagagattataatttcttgaaattatttgttgacatcgtcaaggattgtgaaaaagagtaggtactatcataaggatatggaacaaaatgtatacttctgtatttaaagtagctcattttctctatatataagaatttttcagagagtacatttagtgttattatatgaaatcaagtgaaagacaaaaatacgaaataataacagtaatattgaaaagaaaataagattgttgacttgtctattagaaagttttaatctgtgtttattatatcaagtaatttttgaataaagttgtcagaatatatcaatatgcagcatggaattaagagaaaacaatggacaaaagaactgttgagacataaaagagaggaagataaaaagaagatagaaacatacagggccttggtggaacaaatgcttcaatttcgtgacaataacaattattcagtagaagcaatgcggttgaccacaaaagtgttagatataaaccctgaatttaatacagcttggaattatcgtagagatattattacaaatataggtaatttgatagatgaaaaattttggcaagatgaattaaagtttactatgattcagttgaagagatttcctaaagtttactggatttggaatcatagagtttggatattaaataacattcctataaaccaactaaaaatgtggcaaggtgaattaatcgtagttaatgcattactggaaatggatgcgagaaatttccacggatggcattatagaagggttgtgatatccaatatagaaaaattgaccaagaacagtctaaacaaacaagagtttgagtatgtaacttcaaaaattaacaaaaatatttcaaattattctgcatggcatcaaagagttcaattaattacaaatatgctatcgaacgatcaaattgcggataaatatgattttatgaataaagaaatagaatatatcacaaatgcaatatttacagatgcagaagatcagtctgtctggttttatataatatggatgataaaattccctattgtaaaagaattattgggtcaagatggttattcaaaatttttgaaggaacttagagagaatgctgaaatgattaacatggatgaattagagttttctggtaaggacaacttttggtgtttgaaaattattctagagatagatatgattcaaaattctttcgataatctaactgataggtcagtttttaaaggctacttagaaaagcttataaaacttgatccacttcgtcaaaataggtataaatatcttctatcaaagttgtcttaatatatcatctacataatactatatatatatatatggttacacattctgtaaggattctaattcttcctttaaaaacttagaggaaaggacatatcttctttcttgaacagaatattgtctaggtttattcaaaaatatatcatattttacatagttattcggtacgtcttcagaattgacttcaggtcccaactgactctttatttgaatgaatgtttcaacgctaattggatccaaatctgctggtaagttatacttcaaatcgcataaatcaaatgcattaatgtagaaatctattatatggaacataatgtcatccactataacttcatctgcacctatcgcttcatgactattcaatggccaatgttttaaattataaagctcgtatgcaatttttattgtagctaatgcaattataggtggtggtaccatgagaatcacatcgagttttaaaacatcgtacgctatacaccacgctaaactacagactttaaaatcaaaggaatacgttttaccaatctttataatatattcatcaatatagacattgttattgatacgataatcaaaattacatgattccagtatccttaattcgatttgatataatcttttcttaaatgattccaatatattaggatttattttaatcatattacgaatttgtaatgatagaatagcaatctcattaaccttcttgactgtttctacttgcttacaacttaaaactaaacaacttgtggctactgtataacatagttctgtttcaaaactattgaaaagatggtaccgttgatagaaatacatagcggtttctaaagtctttctaggtaactccaatttgatacaaagttcggataaaaaattaagaataccaagctttttctgattataagttcttcgatcagtgattgtattcctttgtgcacacataatttggtttttggtgagatacggtctagacaaaaataactgggattcaaaagatgatggcatggtaaatggatagaaggctttcgtagtgatgataagtataacttttctgtttgatattgttgaagtattataaaatacaatatatacagtaacacgttgattgctttttcttctctctttttttctgtataaattaatagctttaaatgcaacacattactaggtacaatctatagttttataaagttcactgattcaaaatagtgaggaaaaaaattattaatataaacgaaaaatttcactcgtcaaaataaaatggagagaatcaactttaaaaaagatagtacaattctaaggtaacactcacacagtgataacagaatagtacattctgttttctatcattttatggacatttacaaattataaatttgttagagtagttgtaactcaacttttatgtctcctgtgtattgaaggtattaaaattttgatattagctttgctttttggatattagttaatacgatatactattgcttctgcaagatgagacgtcctccttttgactacgcaccaagacattattatcaggcaaaatattcgagtaaaaatatacccatatttgaaaaatcagggttattagatgagtgtgaaattgttaatgggatccaattgaaatattccgaaccagctgatgcaatttctccaaaacaatactttaacactcaccatattccattacataagagaccaattttgaaggcaaaattatatcgtaaagcatctgccttcccaatcaaagaatttaatcttgaaaccaaaagttcctatcttattggtcgtattagtattaataagacctccaatggtatttactcttcaagaaatagtattttagatataggtatacctgatagaagttactctaaacaacactgtgtaatacaatttagagaaataaaaggtagactttgtgcttatatcatggatttagaatctgtcaatggtacatcattgaatggtatttctattcctactagaaggtatgtggaactttcaaataatgataccatatcatatcaaatagaaaatgatataagtgccgattatgaggttctatttcagcaaggctaatctatcaatataaatattcacacaaccatgctttaagattcctttttgttcatcgtaagctaaactacaacaaaagcaactgattacttattacagacatagtgatgaactgatctagattttgctagtgcaactttgggataatgagtccgcaaatcttatacttaaacaattctaaacatttagttttgtttttattttttttccataatatcctcctttatttcttcagacttacattaaggctgtttttacccttttaacttacgacataaggtctttctcattgattagaaaatgttttctcaagaggatattgtttccgtggaatatgtagatttgatgtattgattttatatttatgggataaaatactattaacactagtgatattatctgaatgtgtgtctaaatatggaagtaaaaatgtaactatatagaaatattattgattgttacttaacagtatcaatggattaagaaaataaaattataataaatttgagaccaatttaaaaaaaatttaggaaaaatttttgttaagattactatagagtattactaattaatgatttatcttttcttttgtattttactaaaaggtagtgcagcatataaattttctgtctattattatgaaagggtgatacttcatttgctttatgctatctacaatttactactaaggatattttaggagggataaatatatttaaaattattgttaaatattttttataataacaaaagaactgttagaatattaaaaataatatatctgggattgttagccaatattttgttgtatactgtcatcagaatagcttttgtcactgcgatatttatgttgttgggaacgtttctttaagaagttggataatattgttgtcaagacatttgattatattaataataggattgttatatgatgttcatttaactgttatgcaaaagaacttcctgttagttagaatctcttgtaatatagttcctgtaaatgctcttgttatataccaatgtattgtcttgtcactgctgtattactacagcttgtattaaaaataggtgtctgtctaatagaaattatgggagtagctatattgttttagaagttcaaaatatttttatatggatactgatagctagcttctgtatgtaacgagattaatattcctacattttttacaatctgataacgaaatattgacatacgatatggtactactatttttctatattatccttaccagtaatattagtgtgtcaacttataattcaacaatataacatttatcaattttaattttaaagagtgaaaagcaatacgtatcaataagttcaattttaagcatattttagtggtatattttactgacatttagaccagtgatgttttgatgaagataaactgaaattggaaatatttacgaaagtaaactctttgtaaagcgaggatatggctaaatcttaacaagttataattagaatatggttttcaagacgaagatagaaaattttattattaaatattgagagaaacgggaatattgatgtctatattatatgtacttataatgcataaatgaagaaagtccaaaaaaagatgaactatgtaacaaaaaactcctcaaggaaaatatgactaatctgattggaaagatttaagcaaagaatacaacattgaaaagtggtggttttaccaacatgaaatttgactcaattattgaggtgtatggaatttggacacttttttataatggaaatactgttggtcacctttctttatgtgaaactttctaatctttcctgaaaaaaacgacagtattttattaagttaaccttaatgctgatgtgaattgaatatataatgtaatcaacatgacgaataacaatgcaaaaattgaaatcgaataaatagaggtaattcaaacaaaatattaacttctagtaagttagaaaataaagagtgtgatagtgcttaaaaatctctacgctaacatatgaaatctaagctgacagtaataaaaataaaattgttgtctctaataatgaaagagtgagtacaaagaaagttcccttcaaatatttgattagaatattatctgggaaaatcttgttgcaccacaattttatgttacctgttaaagtaaaatactttgtaatataaaatgcaataggacaaaaaaattaagtgcaaaaaaaaaaattaaataataataaaatagagtaattttttgcgaaagttgtgtcttaatcgtaatctggtttacattttctaataacccatgcaacactgacataaattaagcaaaatggagaaactagagcactggcaccaaaaaaaagaatttgaaataaacacatatcaaaggacaatgaaggcagaacgcaattagaagattttaaggctgaagttttgatttttttcaacttataaaattaccgagtaccaattatatattaactgacacttgcgatttttcctaatacaaaattatggtagaaatttaaaggaaacaaacgaaaagattaagtgaaaaatgaaaaagaaagaacaaattattgtaaaaaaattagaatggttctgtcctttttatatattaattttttatgaaggatattggtaaattaattgctataatatattcttaatataattaattttagcaaaagtccaagacaagaaacgacattttttagcaaaaaaaaattaattagttgcgtagagtgtcacaaaatcaggaaaccaattatttaattttttttaaataagaacaaataattaagactttaaatgtcaatgttttaaccttttttttaaaatttattaataatatttataatcggattatttcatttcatttattgtttatattttcgagtaataatataaaaaaaagaaaatattaggaaagaaatccgtactgtagtagatctcaatcatatatttgagataattgttttttaaaagaactaatattatattcgctaattgaaaaaattagagatataaaaattcaaaaaagaatattgttaaaatatataagaatatataaatatggaatagagaaaaaagaaaaaaaatgaaagaaacattcaatgagtagtttttatacttactactatttctactctttttcaatgatttctttctataatttcatttaaaactcttttaacgtcctccttgctaagaattccttggtgtaacaaagatttgattgaatcaatataatcaatccttttttcatcaggaatattcataaaattaatatttttgcttctttgccatttaaatggaacattggccagccttagttcctgatacaaatattttggatgttttaatttcatatgttgtaaaaggttatcctttcttttgtgtctacttagacaccattggcagaaaaaatgtctttctgcactatgagataataagtgtcttttcaaccaagaatgccttttgaatgatttcatacattgctcacatttatgaggataaacttcttcttctctgctcttttcaacggtaaaaatagcatcattattatttccataattccttttatgggtgattccattatcttgagttaaagtgttgctattaaaagtacgataagttgatttagggcttaaatttccatttataattggatttagattagcagcagaatactcactgttactatccgtgtttattgtagtggtggcaggtacagaaatagtatcgcccacagctgctgctgtaggactaatagttgtacccgtgaaaatagttgttgttgctaatgtggatggattataagaacttgaaatagaatatctaggattcacaacagttggcactacagtccctccatttaacactgttggtggattagaactaatagaaaggctgcgtaaaggaagttgctgagagaacaatttttgattattttgtcgtttttgttgacaaagttgagtagaggccatagaagatgcaacccctggagaatgtgcagagagtgcagatagattagaggcagatacagtggtagggccagagaaagacaagctatgtcctgtacgatactggcttaatgattctgtcttaatgttaggagtcattagaggtggtgctggaccgttactaaatatagttgatgaattgaattgttgagaggatatagacaatctaggatggttttgagagtgctggatgacaggagagttttctgggagataactattgtagtctattagtgaattgttattattgttattttcattgttactattatttcttaaaacaggattgctaagcaaagaaaggaattttgtgtctttggtattgttactattaacagaaacgggagttgtagttgagcaattaatgctggtataattgttatcgtattcgctattttgataatagtattggctattttgaataaatgggtttttaaagtcatatgatacagagggacgtgcaaacaacccattcgtattctgtggagtataattgttattattgttattgttagtattaatatcatctgcttgtaaatattgagtattagaaggatttaattttggtacaaagtttgagaaatatgaatagtgttgtgactgtggtttttgatgcgaggaagtattaccaccattattggtattagtacttggattatttggattgaactttgaggcagaacgataataatttgaatgtattatatttggattattgcaagaattacctgatgtatagttattatttaagttagtggtaggaggtgcagttattgtagcaaaagatatgttatgacgactaacggacgcccttggtgtagtagaatccagcataggatgtaataaagttctagaactaaatatagccccattatttggatgtgtgctgttattattaatattattactgttatcattcatacctgtcatcgtgataccattattataaatattattaatattattgatgttattaccatttgaattaaacgtatagttcaaagaggtcatttggagaatgtgtaaaataaaaaaaaataaaggatagagaaaacggatacttataaataatgaaacgtttaatatgtaatatttgtatgtttgaaatattgtaatgtttgcgataactttatagatctcggagtaccgtaaaaggaaatttacaattttaatggagagagaaagctttctcgaagcaacgtaatatttgttattattattaagcaaaataaaaaataaaataaaataaaataaaaaaaagggaacgaaaagaaaaaaacaaaggaatattgacacaaaaagtatatttgaatagaagaataacttttgaagtaaagcctgagtactttgtatgtattagttctctaatctatatatgtagaacagtagtgttatatcagtaatagtaagtcttctttgtatgaatatctgtacataaaaaaaactacgaaagaagtagaattagaaagacgtctctttacaatgttagacaagatagcactaaacaaatcttgagtagagtgtgagtctgaaaagtagaagtgaaaggtaattagttgatgcgaagttaggaaagttgaaaaggcaaaaaatgtgactaaatgtcatcatcatcgacctccttcctgcttttctttttatataagtattcgctagacatctcaaaatgaaatgaaatgaaaagacaataattgtgacaaaacatgttgagatctgaatgatagtcccattttgtaaacaattaccatgtcgaaaaaagaaaaaaagaaaaaaaacaggagttgcggaacaaaaacaagttattatgattcaaactcaagaagagaaacaacaaaaagaaagtatgaaaaaggaaaaaaagaaaaagaaaaagacaaaagtgtatgcaacaggaactaggaaaccaatcaatagacgaaaagaaagaaagaaagaaagaaagaaaatatctaaatatatctttgtattgtttataggatcattattgttattaacctacccaatattgggaactttagggacttatacagttccttgattaggtttactaataattttatttttttctcttttattattttaaatttttttttttattctctttgtttactttcttgtccatgttgtttacttaagcaatgaataaacaaaaaaagattctaagttaaggtacttcgacagtaacaacaaacagagggacaaacagacaaatctacaaacatgcgcttcattttttcttcttcttgtttttggcttggttttctccattaattctgtaatctacaccaactccttttttatttttttttatttttatttttattttttttcatttgtttggttcagctatttttacatattactacgtttctattggatcaattataaaatcggattttttaaactttttgttttttccctttttttgtttttgccttttccctcaaagacaataacagaaaaaaaaataaatagaacaatagctagaaaacaaaaaaaaagtataaatcatattcagccgtttgctgttgtttcaagttcttttatttatttatttatttatttatttattttttgtgtgtgtttctgttttgtgacaacaggaagaaaaaaaaggggaactcaaaactgaaaaaagggtattcttttttaattttttgttgccttttctagaatcaatcaattgttaatcaatcactttttattttgtttgaagaaaaacaatagtgaagaatagacaagtcatcatagtgacactatttcgtaatagaataaaacaattgattacgatatacacatacatacatttattatatatgtgtgtaaacaaacaatctgatcaaaccagtcagagtaaaaagagtcatcaatctgtacaaacccttttgtaaaattaagaaagcttgatgagtggagttttctatatgtccctctctttttttttatttttatctatttatatagtctataaaggtaggtgtaataagtaatatatgggtttaatcacatgttgattggtgacactgttagctgtactttgacgttttctagttctattagcaattctatctattagttcatcccttggtgatcccacagtatatctaaattgtaatttcttatagaatcgtattgcaacttcgttttcgctgaaaactgtcagtacaattgcacttattattgtatcatttttgaatacagatttgctattgccatcacaattattgtaccccattgaagtatcttttaagcagccaagtagcctctgtccaattcctagtccacgtagttcaggcaatatttggatttcatataaatacaccacaaactcaattgctccaatccttgaaacatcaatctcttctgttagcataaatgataaaaacaacacaggttgcaaatctgtactcttatctctatctgtgtctgtcctccagtaactaacatagattaatcctggacttaacatctcttcccatttattcacttcccaagatttctgattattgtatatttgatgactcacttctttatatattttgccaagattgatgtccaatatatttaaaaatttctttagtatctctacatttgttttattattcacagcgtccaatgatgtagaatatggctggattgaatcaccatctttattaatagttgtgatggttttagaatcatctatatacatcgtatgacgtctaagtaatcttttgacaccaatatctctatccttttcctcatactcaatagtttcagggaaaaataattttaatttagatatgaaagtgttgatattgtctaaatgactcattttggcctgctatgcatatcttgctatatatcgactatcattcgatatttttcatgttaaattgtcttctttgtttctcttttttttctatctttcttctctctcttttactctcttttttctttgtatatgataatattaagcaagttttcgtattcgagagattgcaaaaaaaaaaaaaaagagaatagaaaataataaaaaggaaaataatgcaaaaaataaactgataaataatatagaaagcaattcgatatatgtataaaatgtataattatatagaatcttactatatatttaccagttttagcacatagtcatataagtaagtgataccatcaacttcagactaaactaagaccttgttgtggtcaataaaattatatcagaatttcaatcaattataaaggatgctttttagactgacttttatttttttaattcaattattagcaatatatttcttcagtttaggttttttcccaaagaaaaatgtattgaatggagcctctacttttaattacaatgtttcattacaaaataattctaaacctgtattcgacagactaatattggttgtcatcgatgccttacgaagtgacttcattttcgataaacataattcaaatttccacttcgttcattcaaaattaaattcaggggaagcatgggggtttactgcattcgcaaatcccccaactgtcacattaccaagactaaaaggtattaccacgggttccacacctagcttccttgacgctattttaaacgtggctgaagatgacaattcgtcatctatctcagaacaagattcttggttacttcaattacgtaggttttcaaaccataggataaggttcttcggcgatgatacttggctgaaattgttctctccagcagaaaaattttttgatgcgtgggaaggaacaaattcttttttcgttagcgattttcaagaagtagattataatgtgactaggcatatacagacccaaataaatgaaagagatcaatgggatactttgattctacattatttgggtctggatcacatcgggcataaaggtggcgcctattccaaattcatgcctaaaaaacagattgaactggacactatcattcaacaattatacgaggaaatcattgatgagaattctcttctggtgtttatgggtgatcatgggatgaatgatataggtaaccatggcggatcttctgctggtgaaacacacgctggtatggtgttcatgtcaccgaaattactacaatccagaccttttgaaaatgtaagtgtgcctcttgatacaccattaaatgatgatggtgaagtcaattttgaatatatgaagcagattcaacaaattgatttggtgcctacaatctcaacattatttaatgtaccaatccctaaaaatagtgtaggaataacaatttcagaatttttgccgtttttagataatgatacaagattaattaaggtttgggagaattttaggcagctttctatcttaaataatgaaataatcgataaagactttaaattgtgggatatagataaactttatttatatatgaaggaggttcaacaatctttaacaagatcagccactaattataactatacaaaattggctattggatatgtatttgttgttttatctgctatcttaatatctctattaaccataaaagaaatgcagttctcgtctattatgataatgctagttttcatatcttcaatgataggtatgtcaacctttagtagtagttttgttgaagaagaacatcaaatttggtggtggatcattactggaactttattgttaataatagtttcaaggccaaagaaaaaaactacatatttctcaagcttgattatatttatttgtcttagacttattcgtggatggaataacacaggccagaagacggtatattcatatgttattggtaatcttttagatgagactccaagtattaaatggagtttgaattgtgttacaattttatggttaagtatcctatccacttttgattatttatctcctttagctcagcttattttaccagtaataattctttcatataaaattaattggactatcgtggacaaagagagtattcctgattatttgaaagaaatggtcaaagttattacaaagtatttattaaaagaagatcatatggttttatttgaaaatgctttgatcccaacagcattaattgtttataagttattttccatcttaatgcttctacgcatatttttattggtcattaaggggagtaataaagagaaatttattaaaagtttattcagagatatcacgatgtttttactatacctttcaccatcaaggaacattcctcagtacttattatttgatataataggaaggtgtgcaacccaaatattaaaagatgaattcaaaagttcattatacttgatcccaattgtatccatgatattacagcatttttgttttttccagttcggcggttcaaattctattgcaactatagacctatctaatgcataccatgggatatcttcggattataacatatacattgttggatacttaatgacagtgtctaattttgctcctgctatatattggaccttattttcgtggcaatatctttacagtaaaagtgtaactcataaaaatacaaataaatgggagatatttgcaaagagtaaattacccttcatattttttaattgtattattgggtgttgtttgtttgcttcctgtataatattaagataccacctattcatttggagcgtgtttagtcctaagctttgttactattttacttggaatttatttatgcaaggagtagtaggctggatctttgagatgataacagtggcctttttatagactgtaatgacatgcgtgtagatagaacatctataaaaattatatattattatattcttgtccatacaattaagagatactatctacattaaaatccttcctaattatggtgttagccgagtttaatgaaacaattattttttatttaacagatcaataacgtcatataacgcatgcatgagatctcctctacgttgtagtgataaattattgattatgttgatggtaataatggatgcacagtgtaactagttttgtatttttattttatattttcgtgcttggttaatttttggatatatcataccagacgaagattggacagattggaaaggatgacaaaaaaattaaacaaatcattagaaactccatcgaaaagattggaattgcctcacatcttgattactcatttaaagaccttcaaagaagtagttataaacctaggaaaggttccgcatttcgcaagacaagcacccgatttagtcaatttaaggactagtattatatatatatatatgtatgcacatttataaacacctatatatttacatagccttttgttagagatatgagttcattaagtgtgggtaactccaatagagtagatgattcggtttgtaaatcaattgaatcaaaatcaatttttagacttcctgcactaaatgggcttgataatggtgataggtatgtttttaccacacataatggaactcgatttgttcaattggaaacattgaccaaatttgtaagatgggcttttgttaatggtggcgagtataattctatgcctgtagatataccggaaaaagcatcagatattattgatgttatcataagtaataattccaaatttattgcactatacacaggtattgacatatacttaatagagatcccatggttatacaaagatgtctgcaatatgaaatcaatattccaaagaaaaattctaaatatcaatagcatatcaaagattaaaaaagttatatttcatccaaaggctaccaatgatacatgtttagttattttgtttcatgatgattcaatctggttatatgatttagaaaatgataacaaagttgttttaaatgaggatactggtcgattagggcttggggggaaaattacatcaattacagatatggagtttagtaacgatgggttaactttatatcttttaagtgttgccggtggtggagacatgtacgctttatacccatgtcttccttctcgactttccatctcgaataatgagactcaagcattaattagtaggtcggttgtattgtataattctattgataaagatacaaagcctgagataaagagaaatatcatcaaacaagtacaatttgctgctcagttggatattaaaaaaggagatgaaagttataaaaatggaataaatattgaagatgattatagacatgtaaaaatacaaggtcctttcactatcgcaccatatcccagtaaattatatgacacaactgcaaaggaaatatcaattattgacattggtcaaggtaatgaattattagcaatgctttttgatgataatactttgctatttttatttaaagacttagaaatatctatggtttgggatagttcaaatttctattacaataattctctggttttaattgaagacttgcaattatccacgagggatgattgcaagattatgaaatcgtttgtgaatatgggtaatattttgattaatgataacaagaatatttctttaattgacattacgtcttggtcatccttagtctctaactgtattgtaaaacaagatatggctccattaacaaatgttgcatttaatagtattgtgactactctaaattggaacgataaatttctttcagctggtatttggaatttcaatggtagtaaaggcttacttgtatcatcaccattaagaatatatgttaaaaacttgtcaacaaagactaatggatatatttctaaagaaaatactattaaaagggaattagaaaataataacagtaaatccaattattcagtgtcattttctcaaccagccagtgaaataatggaattgaccaagaggtatatagaagaatgtaaaaatccattcccagatataatagaaccaaaagttagacaagaagttttgtccaatgattcgaacgagaaacaattagagatcatgacaaaactttctggtgatgtgattaagaaaattattaaaggacaaagtttagggattactttacatagtaggattttggaacaacaatatgaattgacaagacaattgggatatactcaaaaattgatatctagacaaactacaatcgagaatttaaatcagcaacaatcgttacaatggaatcaaaggttagagaaacaagtggaacttcttgatagatttaaaaaattaaatgaaaaattgtcaattattgaagccaatgataaatttaaggacttagtgattagtaatgaagagataaattggtttaaagagattagaaatcaagcaattaaatttaatgatttcgttcataaacaaaaaaatgtccaggaagatttagatttcattaaaaaggaacttgtattgatccaatctaaatctcaagctttggaaactaaaacaaagaatgaatggggaagtctacgtcaaatgctcaaagaagattcaattcttataaagcagtcatacttagtatcagaaagtaagtaattataaatagatcatatttaatattgataaaaaagccatctgctagtatctcaaaaaactatttctcttcttttctatacccttttttttttcatcatgtgtatatctatatgtatttaatcctggtgcaattaaaaaagtagagttacataagaaacaaagtaaatgagaagtaggtacaaaaatcttataaaagaaatacactaaagggataattaatgatttcgggatgtgcttcgtttaaagatcccacaactctctttagtataaactggtattcttggttgtacattgatcagttagagacaacattttgtagcatttgtataaatacagtatctagtttgtaagttgttctttaagtacatacttgaatgtgggtatgtgttcgtgtatctgattattgttctgttttctttcgttaattcaacaaattttattttatagggaaaaagctttaacggcttggaaaatgtctctaaatatgaattcacagataaacgataaaacgtgtctcatcaataaattcacaataaaaatataatttttccagttctatcgtacacaaaagttgtttactgtcagtagtagtgagaacttcactttaaagtacacataattaatagtattttaataaccaacgctttagaagtgtatataattcttttcgatccctttttctttttcaaatcaaaataatatttgtaatccaattggcatgtccgacaactcataattagtatataattaattaatacatgaatacactgtcatacttttcacaatacatatttaatccatttagtaataaggaagatcctccccaaaaaaatggttttgaagataaacataatgaaccattgcatacacaagatcccttagaaaatgtggataacatcgactttgatagtttggtacctcttacagtcaatattaagtcaagtgacatagaaactctagaagatacggactctttaaatataacagaaaatactgaacaaaataatgaagagaaaactgcttccaatatgaaattgaatgtatcccatgataaagaaaccttaagtaatatacaatatggttttaagagaattttgatgtcaattattttctttttaccctgctatttgatatataaaccgttttgtttcatgtggcgggttataactttacctatatcttttgttgaaagaggtataaaattacgtactagatcgcgtctaaaattcttaaataccaagaaatcaaatagcatatcttcaaaaagttcaacgttagaatctattggtgaaacaccagaagaggatttatcatctggcgaagaattttatctacaaagagatacagtcaagggatcattatttagagcatcgactataaaacgagataattcaaaattgaaacaaggtaaatcattagttaattctgatggtgccagtcatgttagtacaactactttaggcactaaaaaaatgggaaggtttttatttcccaagaaattgatacctagatctattttgtattcaaaaaaaaagaaaactttagtaattgatcttgatgaaactttgattcattcgatatctagaggtacaactcataacaacccatcacaagcacacattgttgaagtaaaattttctactagtggggtctctacattatattatgtctataaaagaccatactgcgatcaatttttgaataaaatatcaaaatggtacgatattataatatttactgcttctatgagggaatatgcagatccagttattgattggttggaaagttcttttccaggtaaattcataaaaagattatataggaatgattgtacacttcgggatggtgtgggttatattaaggacctcagtattatatatggtggaggcaagaattcagtatctgcagatagattaaatgagataataattattgataatagtccaataagttatgcaatgcaagtagataatgctatacaggtggaaggttggatcagcgatcctactgatgcagatcttttaaatcttattcctcttttggaagctttaagatacacgacagatgtacgtaatatcttagctttaaaaagcggcgagaaagctttccatattgaatgattttgttcattatattttaaaaaaatgtcatccctcactgttctctatatttattttcacatcacacatataaatatataaatttacatatgcatatattcaaaaaaaaatgtcattactcaggtaaaatatggataatcagttgttaatgaatatattaaacttgttattctcaaaagtacatacatctttccaccaacttcttttggaagtaaaatgtacacacactatatacatgaatatcgataaatgcgcaaaaaataataaaaaaatcatagaatatcatatatttcgaaatagaataaagtaaaacatgatgaccaacaacgtatctatttaaattccaaaataaagcttcattctctcatacacaaaaaaactgcatgcaaccattggggtaactttaatgtatccaatacttaaaccaacaaagaatcctctccatccacgttctacatagatagtatttgcaatgtctaaaataccttggaacttatgtgtatacaaattttgaattgataatgtactaacttgcaatcttcttcgtatgatttcgaacggatacgatgcagtttgagatagcatacctgctaaccctcctgaaaataattcagcccatgtcttcaatggcgttctttggtttctttcagctattaggaattcatcatcttctgataattctaatacagcgtaaggtgccaatatgggatgtttaagcatgtcatgtaggaaatcgtgagcgaaaaaggagactccagcatatggaatcattcctaaaactgtcggtacataaccacgatagaaattacaccaatgtgcaaaccaattagggatataaaattttgatgttaacgtgatagatgcaggctcttgatatattgttttgacaatctttaagatatgaggccttttatgttctgtaacataagccagccttactctagtcagatctagtggataagtgacaaatacactacataagcctgctagagacccactaatcaatcttctccaatgagtttcatattccttggacggtattaagtagcctcgaatctgttcatatgcaataaatttgatggcagcatatggaaatatccttaaaagagtaatggaatgaccttgatagaagcctctaacaccatcgtttatccatatatgtcttgcagcttcatataagcccatcaaggaacctgagtatttagtataatgtggattagaggtttggaacagaatttttatacgatctaaaggagctatcaaagattttgcacatgccccagagagaccgcccgcaatccctgatcgtattacataatccattgaatttttattaattatattgcgtttattgtttcgagtatccatattgacactagttttatcattggtattggtattgtttgatataacattttgtttcctgttcatttaaaagtgactaatgaattctttaactggctgtttattttttttttctatttttcttgtgttttcctatattatttttttaaatgatattaagttgtgataatgaagttatatgtattttatattcattaaaaagtaagaatgttatgataatcaaaacaaatagtattactgttgtggatttttacctaaattaattacttattattgaaagtaatactattccttgtgtaatgtttcaatgcaaaacatttatatcaatgtcatgtgtggatggcttatttcttgtttgaactgtggtactataacctatcaaatattgttattattattttgttcaatgcgttttcagttatgttgtttgagaaaaaaaacaacccgaggaaaaaaataactaaagccaaaaaacaaaagaaaaaagaaaaagaaggatttatgaatcagaaccgagactgcaacacaattacctaaataggaaatattctcaaatatagcatctaagatctatttaaaatcttgtactttataaagatacagtaagaaaatttaaaataaaaaaaaaagaataagaagatattatttgatttacatatgttattttaatcaaatcctattcatgccattttcttttatttttttttagtgttcttgagatacataggagacttcttactgaatcaccgatgagtccaaataataatctttaaatgttataaaaatggcagaaaccaaggaatcagtaaaagaataatgttacttgtatatcataaaattttcctttgtatttgaactatcctgttttaagcaactgatacatgtgcaacaatcaaattaatactaaaagacagttactgtttgtttcatcgaattatttttcaaaatattattaacattcagtaaatcatcacccatagagtttatttatttatttatctgctatttatatttgtaatatttctaagattatgttgaacttttctgttgatcagataagttagtgtatctatctttatttaaaacaattattaatttcatcttcattatacatataggtttaaatacattatatatttacttgtggcggtgatccttgcaataaaattgggtatacaaaggcaggcaattatggtacattaattataaaaattcatgatatttaataatctgagttaactttagtagtacatagtgaaaataaaataaattatttctttttacggtaaaacaaatatttattaatcggaagcttttttggaaaagttaatgttgataagattgtgaaggaatatactagtacgaggttctacttaagtttcacccttaagttctacaataatgctagagaaagaatatctaaatatatatatatatatatatatattatactagtaaaaaaataatcattctactagtaataagttcatttaaacagaaaaattgacaattatattttttatattataatactacactatttttatatctaatatatttattgataaacttagtgagtttcagatggaatttcgaaaacaatttgcttaccagtcaacttgttgtagacagcttggaaagattccaatttgtaatcaatttgttgaatgtccttggagtctaacaaaaccttttggattttgttaccaccaactaagtatctaactctcttaccgacgatttcagttgggaaaaccatgtcttctaaaatcttgtcgtggacagaggttaaagttctagatcttggtctcttttgttgttgtctggaacctctagatggctttggtaagattcttctttcagctaagaaaatgacatgacggtctgggaatttcttttctaattcacgggtcaacttggtttgaaccttgtggtaaccagccaaggaaggaactgggacaaagacaatcaaagctttcttaccaccagcaacatcaatctattaaaaataaaaataaaaaaaaacaccaataaaaagggcagatttatcaaactaatacgcaaaacaaaaaaactccatgaaatcttccattttattacttgcatattaatcaaaaaacactttgttagtaaagttgaaactcataaattaaatacataactatatcattggattgattagatacaacaacatgtgttttctttcactatttgtttaatcttctcttttcttcacaaatcaaacattatactatcaagctttatatgtataaatatatacgtattctgccatttttttatccttacttctcaatcacaattttccacacagaactgtacaaatgctttttcatattatattataatagctcttatgaaatttttagatatagttatttcttttgaaatgatccacttgtattttcattacaaataaacatacttctctaacggacttgaattgtaatggtcttaattcagcctttaattctggagaagagttttccaagtcagtgaaggccttagcgaattgcaattccaattcagttggagcttgagataagatcttgttagacattattcctagtgtacttgtggcgtcctttcactggatatacacatatcaaaaaaaaacgtgcatattaagacgaaggcttacgccatgtacacgtatatacatacatatgtaacaatacagccctattttgtatatatctttaagtatttaccataacgatatttggtaagatggttgagcctagagagggaaaagagtaagcagtctgggagcatacctagagttcgatacaaggagggggagggaggccatacacagagaaagaggacacacacaaaagaaaggtactgttggtataatgttgttctgcctgcagatgatgacgataatatttctctaaaccgctttgaaaccaagtatttactacaactaactatcgaacaacactggaagttgagtgaggcaggaaagagagaaaacagacaaactccttgcttttcgaattttcctctcaagaccgctcctttcattttcaaaccagtctatcaaataatcattaaaaatttcctctttagtcgatagacagtgtgaaaattaaaaagaccaaaaaaaaaaaaaataaaacactcagaaatcttatctcaaagtgaaaatacaaatctttgtttggtgtacggatggaaagcagtcactagttgcttgtattttattttaaaatgtaacaaatctttatgttatgatgtatatgcacatttatcatagatacattccatcatttgttgttatgttagtagctctgttgaagttcagtgattggtatatagttcccattaattatgtaaattcaacacacgataattacaatagaatatgcacagtggagggagatggatacagtaaaagcgtaaaccaatcaaatatatgtgacaatttataatttacagtgtgtatggttcctctttggaagcactcactcttacaagaccctcaggtaatggcatagcttgattttctaactgatttggagatttgttattattttcttctttccaatccccaaccttataattatcttctccgtatcgtaataaccctaaaccagcggctgaaatagattgtgttactaaatcccatatacgcatgatgtcagccacacgagaaccatctgtttcaatctgttttatttgttcacttagtataaataattgggacttcatggtctccgtcaagtcagctatacgtttcaatgactctaattccctttttttagattcaattttcgattcaatagttgccatatttgatggaagttataactaatattgtatgctctctttgctactttttttatcttttaataaaacctttgatcttcccacttggtattagtatagttactcatatcttagttttttatgtactttaatctctgtagagaatgttttcttattcttctgtcttacgttttatttttcttttattttttttttttactgtcagtattctcttctacttttaatattttcccgtttaaggaaacaaatcaagaaaatacaacgagaaacacataaaggtattttgatcacaaccaatcaatttgtatagataaacaactgtgcttgcttctatatgcagtgaatatgtgaaacataattactatatgagatagttttatgcgaatccttgattagaatatgtctatatatatgtgtgtacatatatgtatatgtacatatgtagaacaatttatatgaaatagtagggtaggtttgtgtgttattattctactattctggttaagggagagcaagaggggaaaaataaaattaggaatagagtttatttgagttgacacctcggtgtatttagacaaagtgttatatccaattagaaggattggtgtaactcgtacgagtctattccaaagatatagttgtttgtggattggctctttttttagatcatttattttgaatacctgggtgggatataggtacaacagtagtaaaaagcaaacactacgcaactttttgaagttatctcgtcattggaggaatagagctatgaatataggtaataatagtccagttatgagtaaaagggaaaaatttatgagttttgtaaaatctacgaaagatgtatatcttcccactatatcccaaacgattaaacaatcaacaaattctgtttgggatcattctaaaaatttatcttcctcaacattatctagcccttacagagaattaccatccaatatgaagattatattttatccaacatattctaccgaaaaatataatagatatgaaactagaatcagattttctttacaatcacctggaaacatcactagtagaaggaataaactcttagtaatgttaagcagacagtatttgaaatctggattgaatacaaagtctaatatttatacaatatcgcctaatagcgacgaagactttacttcaaatgacaatgctaataataataataagttctcttcagaatacagtttatataattcaaatggtgaatctgaatattttaattctataaacacagattcaaatgagttgaaaattcttaaggaaagattaacaggatttattactaaaaatattggtaatgttccacttaaaatcactacatttaataaagattgtactattgtacagcagattatctctgattccaaaggttttgttgataccaagatagtaactgagttcgttccaacagacattaaaatatctcttgatgatgatccaacattaattgtttctactgatataacagaaacatttcccaattgtcttatcgatccgaagggtgttgcaataattagtgacattgatgatacaataaagcacaccgggataacaggagataagaaatctatgtttagaaatgtgtttgttcataatgtggaatcctgggtaattgattatgttccagaatggtataataatttaaaacggttttataatgctgattttttctacgtatcgaattcaccaattcaattgtattcagtattgaatgattacatatcgaaatatttgcctatgggtcctatttttttgaaacaatactctgggaacttattgtctggaataactacctcgagtgcagacagaaaattaaacacgttaaagaatatcattaacgatttccctcaaaagaaatttgttcttattggcgactctggcgaacaggatttagaggcatacatttccattgcattaaattatcctgatcaaatcgttgcaatttatattcgttgttgtaagaattcaatgagtgatgtggagtcgaatgatgaagaagttattaatgaattaaatgaaatgatttgggaggaatatactaaaccatttcaagatgataacaaacaagattgtaagtcttataatagcataggagaaagtaataacacattcaggcaattacaattgatgaaaccggcaattcctaagaaaactattcagttagagagcaaccagatagatttaattaagtcatcaagaataaaaaattgtgataataattatataaaaaaaagttaatctagataatgaattagataataaacgttttaatagtcaaggatcacagtcttcaccggcaacagaaacaaatataaaagttaatgaacaatcaaattataacaaattgcaaatgagtaatacagttccattaatgaaaagatacagaccaagtccaccaccactgccgttttctttgcagaaaattcattcagatagtgaattaatagaatttttcaataatcgtataaataagtcaaagtatgaattgttacatgttggaaataataataataataataataataataataatggtggtgataacccatacatgatgccatcaagtcaaaatgattataacacatatagtggatattttgataaaaaggcggacttatggcataaaagaattaaacaaagtatatcacaattgattgaaatagaaaaatacgatcttgcattaatgtttttttctgatcccagagatgcatataaggattctatcgagcatatcaacaacttaaggaattagtttgaactgttaaggtttaatgaaatttattatcacagcatataaatacctatatatagacatatccatgtatatatatggcatagctttataaaagtaatatactgtttacataaagagatgattcttctctaatttgataaataaaaatttatataactttatatgttattcaggagcatgtttgtaagtcttcttggcttaacattttataaaaaaaaaggaaaaacaaagctaaaagacatgtagtacttcatctatcaaaatatacatatatgtgtatatatgcactgttgaatagatcttttatgtaatttacatagtgttattgcacccttttatattctttttcttatagcgttttagtttgcaagtaagtttttaaacatttgtttgatgttttcgatcaaaatataaatgcattactatcaaaaacctatttgtattttcagtttttacgtttgaactaacgaattccattgtataaccctaactatataatatagaaaaactcataatacgttatttttattcaagaagcgtggtagcctctttaaaacaaagtaacaataaaatgaaaaataatggggaaaatctcaaacagcccgcattttggaaatttacttgtttaatttttaacaagtcaacagaacacaaaacctcatgttttttttatcatagtagatttcgtaaattaaaaatcccaacatcatctaattgaatatatttttttcttttttgtctttctctgtttctcttgctgttctttttttttttttagttgattttttaagtttgccattatttcttgtttcagttagttaaaactaactgtaaacaaatatttacagatagctatagaagtacgtagaattggcatatctaaggtggccacccttacaaagtgtagattgatttttgttaaagtttttccttttagtgaaaaaaaaagtattaccgcatttaaactaccccatcaaccattattattattgatttgtacattacaattatactttctagcaagctttttttagtatatttgaaataactctattttgcaacgatgccgtcgaattcaaggaataagaaaaagaagagcaaatcaaagagtagtggcaataataaaaagaataacaacagcaacagaaataataataataatatatcaagagatataagtgctgaagtttttgatgaatctgaggattatccaacgtcacgagtgattaagagagccccaaatggtgatgttattgtggaatcaataacacctactattccaacagaagcttccagcaaaaaaaagaagaataataaaaaaaatgatacaaaaggtgtttccaatatggccaatgtattggatcttcactgggaatcgttatcatcagaagaaaaaaaagcaattttaagaattgatagagatgatgtctttcaaataatacaaaaatatcaatccgattatagttgtaattgttccgtttgtggtaaacgccatttggccatggatcaagaaatggaaagaatttattatatgttgtacgaaatagataaaataaaggatccagaaattactcctatcaaatttcatttaagtatcattaaggatttgcaaatatcaaacagtaacagtactagtaataataatgatgataatgataataataataataataataccaatgacaataagggcctttcggcaagtccgcaaactgtacccgtgatacctcgaggtttagttaatatagctaatgatgatgaagatttgaaggaattcttggcatcaaataatggcaattctttaaaagaagaaattcttcattttaagcaagctaagcaattagagcatcaagaacataaaaagaaaaacaatatatctaacgacaatatttttgaagagttttcacgacaattaccttcccctttacttgaagatgaaccacaaggaaaccaaataaagcaacagcataacaaccctgaagcatcctacattgaagataaactttttaagaacaagtatttgcaatttacccataaatatatttcttcttatccaaaaattgctgaagaatatgttaagagagtaatgatgtatccagaaatgagacaagtaactgatcaactaatggcaagtgatggcgatggcttcttgaaagccattgaaaattttgttattgaaagggctagagatgaagacggtaatattgatgaaggttattatcagaaattaggtgatgttaaatcgtttactacaatgctgcacaaaggtcaaccattgactcaacaggaatacactgatctacagagaaatattgcagagagaatgacaagctcatatgatactaaaagaagagaattcagggaaatttcgccattggaaaaagaactttttactcgtttcatgtttggtgaggatagagaacaattcggtgaaatggttatgcaatcatttagagaaaaatttgatcatgcgttcggtggtgcgtcagttagtgcatcattggctgctgctgctgctgctgctacactgacaaatccgttaggtgtctcaaatgaatattcctccatgcaaagtgaaaaagatgaatatgacgaaagttacgattattctgactatgaggaagatgaggacgaaagtgactttttttctgagtatacagatgaggaagataatgatgggctttcaaattatggagaagaaaccgattctgataatgaatgtcttaacccatctcatcaccatcactctaatgaccaaatatttgtacagcatggagaagacgttgatacagatgatcaagaacattattatcatgataatgatgatgaaacccatcatatgtctcatgaagaagattatgaaagtgagattgatgaagccacaagactagaagaaggtaggaagttaattcaaattgctattactaaactattacaaggtagaattttagaatcataccatacaaaacaagcagatgtaaatagattgaagttacttcaggaattagaagatgaaaaggaaaaaaagaaagctaaagaagagaagaaacaaagaaagaaggagaaagaaaaggagaagagaaagctacagcagaaagctaaggaagaagaaagacgtaaaaagcttgaagaggaagaacgtttaaaaaaggaattagaagaacgtgaaaaagaaaggagggaagctcaaaggaggaaagttgaggaggctaaaaagaaaaaggatgaagaacgaagacgtcgtttagaagagcaaaggaggagagaagaacaacaagaaaaacaacgtaaacttaaagaagaaatgaaaaagaagaaggaagaagagcgcaaaagaaaggagagagaacagaaggagaagcaagaagctgaagcaagagaacgtaaagaacaaaaggaaaaagaaaaattagcaaaagaagcaaaagaaagagaagaaaagtcattacgtgaaaagaaagctgaatctcaaaatcaaaaagatgaaaatgtaaagaaaacgaatgatataattgaacaagagtctataatgataaatgacaatgcagatgtaaagatcagttccaattctcttaacagtattaataattcacagttccactcgggacactttctggctaatggcaaggcagccaatatcgataatgtaggatcaaataatgatatcttaccgataattggggagtccttattaggtaatgctacaccatttagtaatactaattcgttatctcttaataaatcaataagccatcaaacaaatattattccaacatcacaacctatatcctcgtctaccgttagtagtttgttaccatcttctttatggaataatattacagaccctcgatcaagtaacaccatatttgattcagtttcgaatcaaaatgcatcgtttctatctttatcaaataatgatcggtttaattcaataactcaaaaaataggaatgcatggttcgtattatcaacatcctcaactacagcaacagcaattagtagcagatacaggtatttccaagtcattgagtgatgagttgaataatttaacatcattactacaatcaaccaatatcaatgattcgttatattcaagaaataatacattgaactcttctttttttatggactgatcctaaattgacaacgggtaattcaggtagttctataaataatagcaatcatgcatcctcattaatgccaactaacaaattattaggacatgatataccagtttcagcttctatgtcacatagtgaccacagtgtacatcaacgcaaatctatttgggacgatgatttacctccggtaaatagtgtaagcgtttctacaactaccaatttcccacttccgttgaatagtagcagtatacagccacattctacaatggatagtaacgataataagaatacgaataacaacaatgataatgatatttttacgtcgaatagttctatttgggacaatacagatttttcaaatacaccacaaataaatccaacatcagttggattaacgactaccatgactacaatgactcctcatgcagatataaatggaattttacaaccaactctctgtacgattcaatcaaattctatgaatgatacaaatggtaaaccacttccaatgagcatgaatttaaattccttaaatgatcatgttatctttgatttaatctgtagagcatacagcacagtgattcaaaaacaaccaactaatcataattttgttcctgtagatacactatatcatcaagttaattcgataatgccgttggactatcatacttttataaataaaatattagagatacgtattttacatggttgtgagatattaaattcatccatggggacaattagtcatatcaagatagatcttgacacaatacctcatagcaatactccctctctacttaaacaaagaagagatacacaagaaaatggacagtcgcaaatgaattcattcatgcttctaaatgcagtaggttcaaacggctcatagggccggtgtattacattatatgatgattaaacatatatatatatatatatatatggtacctaattacgtataggaagagttttgtgtcttcttttttttgtttataatattattactgtcgtaaataaatattcgttcactttgtgtgtgaagtatggtgaattatatattttatgttataggcatgttaatggtttgcgttaatttatatactggtttccttcttttgtttttcaatgcgttctattttacctaaataatacagaaaggatgtaaagaaacggaaaaaaaaaactaaagaataatagtgtggtgttaacatgaaaaagccacatataacgcttgtgtgtcatatacatatatacatgcatacatacatacacacatacatatatatatataagattgaatagatttatagaaacttgtaaaaagaagagaaaagaagggagaaaagaaaaaaaggacataagaaaacaagaatcagcaataataataatagaattaatgtcagaaaatagtgttagaaggaaattggtaataattggagatggagcatgtggtaaaacatcattactgtatgtatttacattaggtcaatttccaaaagaatatcatccaacagtatttgaaaactacgtgacggattgccgagtagatgggatcaaagtgaccttagcattatgggatacagcagggcaagaagaatacgaaaggttgaggccattttcatattctaaagcagatataatactaatagggtttgctattaatgataaagaatcgttagagaatgcacgaactaaatgggcagaggaagtgtaccgatattgtccacaagcacctataatacttgttggattgaaaagtgatttgaaaaaagatgaagatcctagaaatatagtaagtagagaagaggcccaaaggatagctgatgtgattggggctaaaaaatacatggaatgtagtgccttatctggagagggtgtagatgatgtgtttgaagtagccacaagaacaagtctgctgatgaataaagaacctggtggaagctgttgttcgattatgtgaatagtgcccacatgcacacacacacacacacatatatatatatatatgtatatatatttatagaaataataaaatattttgagaataaaaagagaaaagagatgatacaaaagcatgtcttaaactacccctacaacacatattggcatttttattgtcttgtactcatataaacatacaaacacacgtttttaatgtccaatccacaaacatcagacactcaggcacgtatatatttgtatcttgtacttattccatataacatagatattcacagtcacaaacaaagtacaatatattggcgctatcaaaagtacatacatattcgcaatataaaacgtattttcctgatctaacacgtttctttttttttcttttcttttttttggctttggctgttctctttttttttgaagaagaagaagaagatcactttgggcgggaactgagttgaataaactggaagaagaggaagaatcgacttgatacgtgaataaataattttatcaacttgagttaagcattgatattactttattataggtgtgaactatttgaacatatatataggtacacctgtagatattagctagttttactttttcgtattgttctatttcgattcgctgtttaattattgtttttggcacacgtggctataagagagaaagaaagaaagttcatatatattttaggatggctggggatgacaagaagagtgcttctgaaagatatcagaagatatctcagttagaacatattttgaagagaccagatacttatatcggttctgtagaagttcaggaatctcaacaatggatctatgatgaatcgatcgactgtatggtagaaaagccagtaaatattgtcccaggtcttttcaagattttcgatgaaattttggttaatgcagcagataataaagtaagagacccatccatgaaaaggatagatgttaatatcatgcctgaggaaaacacaatcgaagtacgcaacgatgggaaggggatcccaattgaaattcatgataaagaaaaaatttatattccagaactgattttcggtcacctattgacttcttccaattatgatgacaatgaaagaaaagttacaggtggtagaaatggttatggtgcaaaactttgtaacattttctccacagaatttatcttggagactgctgaccctaagtccggtcagaaatatattcaaagatgggaaaataatatgaacgtatgtcatccaccaactattacctcatataagaaaggcacatcttacacaaaagttacgtttaagccggatctatctagatttggtatggaaaaattggatgatgatattttaggtgtcatgcgtcgtcgtgtttatgatatcaatggttcagtacgtgatgtctctgtttatcttaatggaaaatatctgaagattaaaaactttaaaagctatgtggaattatatttaaaatctctagaaaagaaacgtcaattagataaaatgcaaatctctgataataataataataataaggctacagaggttgctgcaccaagtaatatacccactatcctatatgaaaggatcaatgatcgttgggaagttgcatttgctgtctctgatatctctttccaacagatttctttcgtcaattctattgcaacaacatctggtggtacacatgtcaattatgtagtagatcaaattgtcagaaaagtaaatgaaatattgaaaaagaagaaaaaaaaatattaaaccatttcaaattaaaaataatatgtttatattcatcaattgtttaattgaaaatccagcattcacatctcagactaaggaacaattgactacaagagtcaaagattttgggtcacgctgtgagattccaaatgactatgttaataaaattatgaaaactgatttagctaccaaaatcttcgagatcgctgatgaaaatgctcagaatgctttaaaaaaatcagatggtacaagaaagaatagaattaccgactatcctaaattggaagatgctaacaaagctggtacaaaagaaggttacaaatgtacacttatcttaacagaaggggattctgccttgtcattagctgtcggtggattagctgttgttggtagagattattatggttgttatcccttacgtggtaaaatgttaaatgttagagaagccagtgcagatcaaatcttaaaaaatgcagagattcaggcaattaaaaaaattatgggtttgcaacatagaaaagtttatgaagataccaaatcattaaggtatggtcatttaatgatcatgacagatcaagatcatgatggttcacatattaagggtttgattatcaattttatcgaaagttcattccctgggttattagacattccaggctttcttttagaatttattaccccaattgttaaagttacaattactaaaccaagaagagaagtgctaactttttataatatgccagactatgaaaaatggagagaagaggaatctcataaatatacttggaaacagaaatatttcaagggtttgggtacctcatcaggacaagaagtgcgtgaatattttgcagacttagataaacatttaaagacgttccatgctttgcaaggtgatgacaaagaattaattgatcttgcattttcaaagaaaaaagccgatgatagaaaggaatggttaagacagtatgagccaggtacggtattagatccgacaatcacagagattccaattagtgatttcattaacaaagagttgattcttttctccttagcagataatattagatctattcctagtgtcttggatggttttaaacctggtcaaagaaaagttatgtttagttgtttcaaatttaacattaaaaatgaaattaaggtggctcagttgggtcctaaagtcgcagaagcgactgcatatcaccatggtgaacaatctctagcgcaaacaattattggtttagcacaaaattttgttgggtctaataacattaatctattgatgcctaatggtgcttttggtacaagagccaccggtggtaaagatgcagcagcagcaagatatattttcacgcaattgaataaattaaccagaaaaatttttcatcctgcagatgatccattattcaaatatgtccaagaagatgaaatgactgtggaaccggaatggtatcttcctgttattccaatggttttggttaatggatgtgaaggtattggaactggttggagtacaaacattccacctttcaatcctttagatattgtcgataatattagaaacttgatggctggacgtgagctaaaagaaatgcatccatggtttaaaggttggaatggttctatggaaaagattgaaaatttgagatatcgaatgtatggtagaattgaacaagttggaccaaataaattagaaattacagaattaccggctagaacctggacatccaccattaaggagcatttactattaggtcttggtggtactgaaaagactaagccatggatcaaagatatggaagaacagcacagtaacaacattaaatttattattactttaactgatgaagaaatgaagaagaccaaaaaagtggggttctatgaaagatttaaacttatttctccaataagtttacaaaacatggttgcttttgatcctcgtggtaagattaagaagtatgacagtgttaatgatattttaacagagttttattatgttagattggaatattatcaaaagagaaaggattacatgagtgaaagattacaatggcaggtggagaaatattcttaccaagttaagtttattaagatgattattgataaggagttaaccgtaactaacaaaccacgtaaaattattattcaagaattacaagatttaggttttccaagaataaataaagatggtaaacctcattatggtagtattgatgaacaagttgatttagatggtattgatgaagatgaagatgaaggggaggaaagagaagaggaagatgttaacgtcggtagcactgagataattaatggtccagaggagatttacggtacatatgaatatttgttaggtatgagaatctggtctttaactaaggaaagatacgagaaattattgaagcaaaaacaagagaaggaggttgaattagaagaattattaaaactttcggcaagtgatttatggaatattgaccttgataagttcttggaaggctatgacgagttcataaaactggatgaagaattacgtaacggtgaaattgtaggtaaaaacggaaaggtaaagggcaaacgtaaaagaaaaacagacgatgatgattacgatccatcaaagaaaggtactggtagaagaagaacaacaaagaaaattaaattagaggaaagtggctttgaaagagtattgttgaaaccaaaggcagctacagcacctaagaaattaactataattaagacagaggcaaagccatcaactgtaccaaagacttcttccaaaaatactacctctgaagtaaataataaccccgttaaaagcgaagatggagataacaataaagcatctagtagttcatccactatttttgatgaagtaggaaaaaaggaagaaaatgaagatgcaagtttaagtactttttcaagcaaatttaaaaagattagtgcagcatttgataaagttgatgaattatcgagcaatactacactagatagtgtttcaagtgtaaagctcgaggaacaacccaagaaagtaagaggaatcaccagtagaggcaagaaagttgttgaaacaagtgatgaaagcgatatagaaatattatctgataaagatgatgatgatgaagttgttgttcagtcacggagaagaacacctagagccacttctaaagcaagaaagtcataccgtgaacctgcattatcatctgaagacagttttgtagatgatgatgatgacgatgtagattcaaatgaatcttttgtagacgaatagtggcgtacttcatttacaaagaaaaaaaaattggtgcagatatgtagattgtaaggttaacgtcatctttatattgtttattggcatatatttatatatgtacctgtatagaaagttagtattataatcaatcagtagttatgatatcatattaaggtaaataaatggcaagtatgatgtattatattgtgattatttttatttttttaattttttttttggcatttcgttgttttattaagtttcttaccgaattttttagatacttagttgttagtcatttttaagttatgaaagtttctcattttaaacttaataatcgtctttatagaaagtaggatttatgttaaaagaagtgaaaagaaaaaagtaaatggtcaaatatatttaaccctttcaatcattatttatcagaactaaacttggtttatcatgttgtttgaaaaaacgattattcctaaaagacttttttccagctatttaggaatattacaaaggcaaaacccggctattacacaagcttacattaatttatttgcacacccatgctttgatccaatcagaaatcatattccaatcacgtttgagaatatggatccttatacagtctctcaaaaagttggtgaatcgttaaaatctatcagttcagttacaagagaacagtctgccttaattcataataaattgattgaagatttaagtcaatatgaatatggaattgcttcaatccactctcgtcatttaaaagacattaacaaatctgtatcaaatgaggctttgattgctatgttgaaatataatccaggcagagtaaacagttcatgggaattatttattaaacatatggatatctatgaaaagtatataccagatgatgttttgttaactgttttacataaggtggtatattttgatcctgtagatattaaagatggtaaaaagactcttgatttatttgatttgatacattctatactgattataaataaaatccagaatttccagaagataagtaatgagattattgagaaattggtatccagttgtattgatttgaaagcaactttcttactaccatatttatttaaattttcccctcaaatggatttgtttgtaaaaaagctatatgacttaacatcataccaattatttttaatatggaaacatttctcatttgaagatataatgtcttataagaaattgatgtataggttagtaagcactttaggtagaaatgaaaaaatagtaattacagatgaagaaaaagctgcttatatcaatattcgtaaacaattggatatggttaaagggcaattaattgcagatcatgatcttgaaattaatgctattgagatatttagtacatcagattcattcgaaaagttgttggaacaaattgtttctgttgaattacataaaacggatataaaattagctaaaagcattttgagaagtattggtgtttttaagaatgacactaaatctttcttggaattgtatcatatttgtgtgtctgcatttccaggaaaagaggaagaattattttttgaagccttcctgtcattaacataccagggatataagacttccaatgaaacagctctacaatttgcagaagcttatattccagagacagctacagatctaacaagaacaaagatactttgtgttcaaattctggctaatgctaaatttaatattgatgaatcattaaatatatataacgccaatatacagaaattgaatagggacaaagatgaagttactaatctttcacaagctgatgcagttacagaatccttaatattagcgtatctgtcaaatagagacctagactttgcaagggtaatttttgaaggtgcagctaatgggaaacttcttagcgggcccacagcaattaaaagaatgaagggatggttatccatgtatggtgaagctgtagaaaatggagatgtagatgctaccatggagaatcaagttaaactttatttacaaaatatataaaatgataggtatttaactacaccaacatatatgtatatatatgtatgtataattctgtcttaataatctcacactaattacttatggtgtgtatatcaattaccaatttgagactctttagttatcctttcaaaatccaattataatttcattattggtgtataatttagtcgtctggtagaacaatggtgacgaatgtttttatatctaaaggatttgaatgaactttatatgagagaaattattttaggtcaaaatttgctcttttctaatcactcagtatctatcaaggagaatgttacttggtgaacctcaatgaccatctagaagtaaagttgctatggaattagaggatatattaatgaattatctcttatataatagttaaacaaacttgatatggattgagaatgggacatactagaatattattgttgataaagtaacattttacaattgtagttggcttttaatggcgttatatagtagattcttcgatatgctacaaaatacagtattctatatcagattacgattcttgagcggtatgagtttatagaacagagaaatacaaaaattgcattatctattgtggatctatacatgtctgacgtgttagacagttgatttaattaagttgtttagtttgaatgattcaaatattaactagcttgttggagtggattaccatcttacctattggtgtatctttgatttgaagatcattccaaataaatattagatatattaaaaataaaataattaattggtgtctctttgtagtttctagccttatgttaaatttcttttgtagtaaatgatgttaaatatactatttagattttgtcaagatcaagagattcgttctcaaaatttgaatctacagtggaggattttagatatcaaataattactttggtaggtgtcagatggcttaggtaggaaaaaggttggaattttgttattcagtagatctctatatattacataatcgtttattttataattatgcaagattctaaaacactacaaagaggtcaaaaattttgtgattgtcatacatataatgaaatctagagatttattccttaaaagttacattatcttgcttttctcttcatagtatcaagcatagatatatatactaagaaagaattagatacttctacaggtctatattaattgtcccaataccttttttttttgccaatcagttgtttaattagatcgagatgttttatgatactgtttgaaattaactttttggaaaacctattagtattaaggaagtaccatgggttaacatatcacttggtttattcatggaactatgaaaatattgacgatggtcatgattgatatactgttcgaaccttgaattatgacaaaaagaaaggaaaaaattttttttatttgtgttcctcatctcatcgtaaaatgaaaaaaataaaaataaatataataacagagaagaatattttaatatttcaggtagtttggtgcaatagaaaaggtgtacattgattaaatttacttactaaaaccgctctaaaagttctaggtcctgttccacaaatatatctcaccattttggttactggacacataaaatggctaaaaataaaagattacaagaatctattaagaagaggaccgctgaaaaaagaaagcatgaagatattcttttagagagtggttcattcaaggatatcggtgaactatctgcggaaattacagatacatcatatagtggcaccagaaagaaacgtcgttcctcttgggatagtgaagaacaagaatatgaattaaagccaagaaaattgcaaaacgaagaggaggatatggtggacagtttacctattaagattgatggtaaggtggctagaaatttggttaagaggcaaaaaaagacacaagataataataaagaaaatgatgaggaatccttttcttcagaaagtgatatatctgatactgaagaacaaaatatagatcacgatgatgaaaaagatgaaaatgagccagatacagaagaaaccatagttgctttgaaagaagagattgcagagttagttgaaaaagtcatggaagatccagaggaacattatgcttcactaactcgcttggttaaaatggcccattctaaaaatccaaatacttgtaaatttgctatgttagccttagttcccgtctttaacagtgttattcctggttatagaattagaccattaactgaattagagaagaaggaaaaagtgtctaaagatgtggctcgattaagaaattttgaacaaaatttagtagtaaattataaaaactacgttggtcttttgggaaaattggcgaagatcccaaataattcaacaccaattaaggtggctttaggtaatttagccatgaatgcagtaaatactttgatacctaatgtttctcatttcaatttcagaagtgatttactggcaattttgattcgccgtgtttgtaaaccaagtatttcttctgatccaactgcaatccaatctattaaaactattgagacattatttacaggagacgatgagggtacaatatctgtagaagtgattagaatattttgtaaggttgtgaaagtaaggaattataacattgaggaatctgtacttaacacattactatcattagatgtattgcatgattatgatccaaactcaaaagaggaaactgataactataagccaatgaaacttaaaaagaaaaatagaattcatttgtcaaagaaggaaagaaaagcaagaaaagaaatgaaggagatcgaagaagaaatgcgtaaggctgaattggctgtatctgctgaagaaagagaacggaatcaagcagaaattttgaaagctattttaacactgtatttgaacgttttgaaaagtgggaataccagattgattggttcagtgcttgaaggtttatcgaagtttggtaatatggccaattttgatctattaggagattttcttgaagtcatgaaagagattatttatgaagcagaattagataatttatcatctgaggaagtacgaaaagtgctattatgcattgttacagctttctctttaatatcaaataatactcacatgaaagtaaatattgatttatctaaatttgtggatgcactgtattctctgttaagatatgtggcattggatgccgatattgaactatcttataaatctttaagattagctgatccattaaatatagaaattgtaaagccctctgttaatgtttccacaaaagcagagttattattaaaggcattagatcatgtcttctttagaagtaaatcaggtacaagagaaagagcatctgcatttactaagagattgtacatgtgtatgatgcatactccagaaaaaactacaattgctcttttgagatttattgataaattgatgaataaatatccagaaattggaggtttgtattccacggaagataggattaccaatggtaaattcaacatggagacagattctatttcaaaaagtaatccagacgcagctactttatgggaaaatcatcttctttcaaaacattactgcccaggtgtcataaatggaattagagcattatcaaagagatcaaaagaatattcttcttgatcaataatattacagatatttcaagaaggtgaagcgatttcaggcaacttgttgagcctattacacaattatgtgcgtaatattctatagatacaaagcattattcagttttcatctttgtttttttactccctttgtttgttaatttctattctcaatttaaatagcattttagaagataatagaagtgtgtacaatataaaagatattaaaaagtataaatccacgttgaaaactgaacttaaaaagacttttataaaatatatagacaaaggaaaaagaaaaaaagtctaaatatagaagataagttcatataataccgcatggctatatatatgaattaaagatgattacatatattctgtttgaagtcgtttttaaatttgacttatgtgagagatagataagaatgagtgatcaaaaatatgtcgcaaatgacgggataataaatggatatcacgcaaatatagcggcgcctacacccaaaattgagaatacaacactaataaatatggtagtataacaggtatatttttcccatggtttgatagtgttggaacaaattctaatatagaacaagcatggtaagattaagcatattgcaaaacacaaaccagcgcctaagaaggcaattattttatcgaattgtgggaatataatagcaattatgacaaaaataacattcaccactaaacagttagttttttgaataactttagctatttgtaattttttacctttatatttaatttctgaattttgtacattacaaagagaatctaatacagatataattggtcttgcgtttaatggtgtctttgcaattggaattattgtcattaatgcagatattaacccataaataaaaggtgggtagtctggcaataaaagaacatttttagtgatttcatctttcaccatttcaccaaacattaaatatcctactacagcagtacctatatcggtaaaagaagtaattttatatgtttgttttaaacaatctttaaacttagatggatgtctcatatcagttttcaaatttgggaatacggcatggccaccccaacaagcacttaaaagaccaattgataaacaaaaattttcaaaatttgttggccatagtttagtctccatgggatttagcaaagaaccaggttttgtatttttatatataccacaacaggtgacaacaaatactgtcccagttgtggatagaattcccaacaatgatatatttgataagacacttaaaggtaagaagacagggggtgtaactacaaaaaatgccaatatcttaaaaaaattgacagaatattgtggaaacagcgcatttaaggagtcagcaaataaaatgactaatgaaacaccacatcccatcaaatcaattgtgaaaagtgcagagattaaagctcgacctttggaaccgaatgcagcatagcctaagtcagcatatgacatcaaagttggatcagtgtctaaacatctagataataattcagccgtacaaaatgtaccaaacgcaaatatagataataatattaaaccaggaatccatcctgcatattttaagcctaaaggcaaagctagtaaacctatgccaataagtacattaatcgaattaaaaatggtttgcggacctgttgattgaccagcgagaacagtgatcatttctccatcttttccctctacttgttttaaaataattgagtcctggtcaggagcaatattaccagtataaccatcaatgcctaaatttgatgctaattcagctattgaaatagccggttttaaaattgactcatttggtgataaattatcttgttgtgaaggtaattgatcagtagcagaataaatagaaccataatctactgaattttcgtctataattgatgtatcaataccacgaatattaagtattgatggtctctgtgaaattgaatgaataccagctccaagaagagtttgtccattggatgtcaaatttggtcgtaaggccatggaaagacgtctgcctaaatgtgatggagccatggtatcgggatcaaaagtctcatcgttattatctttaaaaaaagatctttctagatcaggattaatttcaatatgtctaaaagaatttgctcttttcaaagaagttgcaaaacgacttaaagaatttggaccacgaaaagaaccaatcggcgtgtcaagaattgactgccttcttcttgttaaagacaaggaattaattttattaatagtagtattgtgatcattttcaacagtttcaagattattcctttcaataggaatcgaaatatagtgaacttgactatgattttgtctctgatttgatctattgttagaaagtaggcctagttgttcttctatgtcctcattttctgttgaagaatggttctcatgaatattaatatcgttagtactgttgttgttattattatgacttttccacattttaaactaatgaatgaagtggacaaaaaatttttgtaaatattattttaagtaatatatactcttaaatttttttgaaatagggaagactctatgctaaaatctaaacaattaatgatgttattattataattattattctttatttgttaacgtgtttttttattttattgatgtgtggatgtggtgggatagtatacgttttataggctgtattctctaagctcacatattttcgttccacaataatttgaattttgcataaagcagagaacaatatatatttaaaggttttttgtgaagtattcggactatttatatctcttctatttctatatatcaaggttgttgtaataagatctgttttcactattgtttcctcgagaaaattgcccaaaggggaaaaacatatacacaaaaacaaaacaaaatacaaaaaaaaaagaaggaatttctcgatggacactttcttttaatttttttctaggaaagttttagagggttccagctatatagacagtggtaaatacatgtgatgataagcatttaaagttaagtgcatgatctgtgaaagagacagagaaaactctgtattgggctattaggaaaatatcgtacaatatcaacaagaataaaagcagtaataacaataataaaaaatgcctattcagcaaccatcaggtcaaattaaattgactaatgtgtctatggtcagattgaaaaaggaacgaaaaagatttgaaatagcatgttatcaaaataaagtccaagactaccgaaagggcattgaaaaggatttggatgaagtattacagatccatcaagtgtttattaatgtaagtaagggacttgttgcgtctaaagaagacttaataaaatgttttggttcgaataatgttgatgatattattaaagaaatcttgatgaaaggtgaaattcaattatctgaaaaggaaagacaactgatgttaaataagattaataatgaaatgttaacaataattagtgcgaaatgtattaatccaaaatcaaagaaaagatatcctcctacaatgattcataaagctttagtggaattgaagtttagtccagttctaaataaacctgcaaagatccaagcgttggaagccataaaacttttatgtgctaaacaaattattcctatcgttagagctaaaatgaaagttaaagtcatcttaagtaataatgctaatgataatagtagtgatgatgacttaatcgaaaaattgactagattaattgcaagtgataatggtacagctactaaatctgcttccgtaacggcatcctgggaacgtgttggactaattgacccaatatcttatagagatttggtagcattagtcaaagatcgtggaacactgcaggtgttagatatggctgttattgatgaaggaggtaaaaattaggcaaaaaaaataaaaaagaaagaaaagtaagcagattaagattcagttaaaagactcaggtaagcatttgatattaataaaagtatatatgtatatatatatgtttaagtgttgtgtagcagctatcaatattattgatacatttgttttatagattttaatacaaaaactaatttggcaaagtcttcattgctattattattatcattattcgtccctttaatgttcctattttctattgaccatattttagagcttaacgtaattgttagattaatgtttgaaaaatgatcaggaaaagtatttcctttatgtaagttagggataattattctttggtataattctgcaatctgggtggcaataactggtaatttagggtcattagaatcacctaatttaacccgtacagtataatcggataaattatctcttatgaaaagctcttcttcctcctgatcacaattgctttcttcttggtttttttcttttccgttaatattatttattcctgcaataggtctatgcattacatcatgctctattggacgtaatcctgctgttgttatgtctaatgtacagttcatttcaccattcaacctaatttgtaacaaaatggaattcgagaaatgagttgcactaatattcagctctcctggtgcaggaatactcttcaaactgctattaaatatgttataactagtatagtgataagaatccatccttactaatgtgtaatgtatgtctgttgaatagctagttatagtatatgtatatatgtttgtgcatgcgtgatatacttcttgttattcaatatcatttaagtattatttttttttacttttttacttctaaaagatatgtgcatatacacatcatgaggaatatgtatttacagacataggaaatattcctttaatttatctcccgtgctccttcttgtgtatgcacacattagttagttggttaattattatgtgtttgtttctttttgcaggtacgtgaactatcgggaaaaaaatcaataaatcaatatataattaaataattaaataattaaataaataaataaataagtagacaggtgagtaattaaagatttctcgaacgtcgcttataagttcttaaagtaagaggttatttgagacgatagacacataagattgtgtgtttgtttgtatagatgactaatagttaattctcttttggaggaagtaataattaataaatgataatcgattttttacaggaagttatttcaacacttattttgaacagtttcttagctggattgtttattctttcactttggcataattatattacagttcatttcaagaagaaacatgatccaagagatattcgtaaagcttcgaccactattcatcgacatgatcatgaagggaaaacacacgagttatctcaacaaacaacaagacgagggactagagcatcagtatcttcaagaagtccattgaatattgaaataaatgaagaaaataatattgaatacgatcatactattagtgttattacgacaggggataccatggaaagagtggatagaaatgataatggtaacatcaataataatgataatggtaacgttaataatcatataaatagtaatccgtttgatgatgttttggctatggaagataaaaagttggtcccaagtttgaaatattattataaccaatataacattgatattgaagaatatcaggttgagactgatgatggtttcattatagatctttggcattttgttccattgaatatgacaatccaagaaaaagaaaaaacttacaatgaaaaatatccaatattaatggtccatggtcttttacagagtagcggaagttttgcatcctgtgggagaaagtctttagcttattatatgtatgaatctgggtttgatgtttggttaggaaacaatcgctgtggatttaatcctaaatggaatattgataaattaaaaaaattttatggtaaagaatctaaattaaaatttaaaaaatgggattgggatataaatgaaatgataaaatatgatattaagtcatttattgagtttattttggataaaaaacctaattttgataaattgactttgatgtctcattcacaaggtactactcaagcatttatgggtcttgttaatggtccaataatttataatggcgagaacaaaagcgaggatgatgacaatgagaacgttgaaggtttttctctattggataaacttgataattatgttgcgttagctcccgctatctatcctggaccattgctaaatgaaaaaatttttgttagactaatgggagctgggattgatagtccatggatttttggtaaaaaatcatttattccattaatgatgcaaatgagaaatgtttttgttggtagtaagccattttcatttttgtcatatgttatgtttaactatctttttgattggaatgatatgctatgggataaatctttacgtgacagaaatttcttgttttctccggtaaacatatcagtaaaattaatgcaatggtggttaagtcctgatccaactaagaacagttttaagtatggtgcagataagatttttcctccagagaagacatggtttcctatctcttccaaaagcaatgttaacgaagatgaaggcacaaatactgatggaacgaagccatttagatcgccccttcatctaaataaaactagaaatggtagcgaattctttcctaggattatgttatttataccaaagcaagatagattagttgatggtgaaaaattaattaatcattttattaatcatgaagataaatcactttataagatttggtacattgatgaatattcacatttagatgtcctatgggcatatgatgtgattgatagaattgggaaaccaattttagataatatgagattaccctatgacatgtcagagtagaataagtggaattaggagaaagatataagaatataaacatttaggatagtatttctgttatattatatatacattaataattttgcatgaaaatatgaaaagttcaagagagatgaatgacgaagtaggaaaatctaagatcctatgttttgtgttgttttgatagaatgtttcagtttgatattgtaaagactggttaagattaaggatgtgatacatacattaattatggttttttagttttatatatatatatttatttacctgttttgttctctaagtgctctttgtcctttaatataaaatggttactagaatataaatagcaaaatatggttatacattataaaaaaagtattagttactagtctaaatgaaggataaattccaaatttttttatacacttttggaaaataattaatggtgtatttttccaaagaataaaagaagtatttaaatgtttaaacaatgtatgcgcttattatatccctaaaaattttttagttgaaattaattaatgttttgtttgtatctaaacaaattcttaaaaaaacatttttttaaaaagaatgatatttcccattttgtgagactgaccccttccttctccaatctgtgctgtccatgcctttggtattaacaaaatttatcttaaaatacacctgatgtcagaaatcacttgataaaaaatcagtatgaaactaatgtaattcatgcataaaatacaataaatattagataaatcgggctcttttgagactagcctttcaaagaacaaaaaagttagtagcaaaaaaatagcaatttaatcaagacacaattaacaaaatgagacaaagatacctataatggtactcttttttaataatatgtatttcaaaaacaaaaaaataaaacaaatacacacataatatttattataagatcatgtcaaaaataaagaaaaagtttatttcaagaatattgcgattacataataatttcattatatttctaaatttcttaatactaaatatgtttaaaaaagcattttataataataaaataaaaaatatatttcaccattacttttcctaaaggtaaatatagtataagtagtagtataatcaaaagggtgacagcaacaaaatgaatcccatcgaatcccaaaaaaaaatagaagaaaattataatcaataatgaacaaccctaaataaaattgcacaacttttttgtaaaaaaattactctgctttgattaccctaatagtatttaacttttatttctttgcaatgttactgcgattaccattcttttttttttttatctttttcattttcacaaaaaaaatgaaaaataaaaaaattttcaatagaatttaaagaacctaaaagctcatctcatcatcattatgttacttaccttcgtattagagtaacaacttcaaaacaaagaaaggcacctaaactgcgtattcaactatactgattttgtcaatatgaaaatcaaaacaatcaagaggagttcagatgactatgttcctgtaaagagcacccaagaatctcagttacctcgtaatttaaatcctgaattacatcctttcgaaagagcccgtgaatacacaaaggctcttaatgccactaaactggaaagaatgtttgctaaaccatttattggtcagctaggatatggccatagagatggtgtttatgttattgccaaaaattataacaatttgaataagttagctaccggctctggtgatggtgttattaaatattggaatatgtctactcgtgaagaatatgtttcatttaaaggtcactacggtatggtggcaggtctttgtgtaactccacaaatccaaactttaaaaaaccaaaatttcatgttatcatgtggtgatgataagaccattaaattatggtctatcaacaatgatgattttagtaatataaaatctgatgaggaattgataacatcaatcaacggttcaggtgctttaataaaaacattctatggtgaccatgcattccaaggtattgatcatcataggtcaaactccacttttgtgacaggtggtgcacagatccagctttgggattctcaaaggtccaaaccactgtccaatctttcatggggtgcagacaacattacatcagttaaatttaatcaaaatgaacttgatatatttgctagtagtggtagtgataattctatcgttctatatgatataagaacaaattcaccaactcagaagattgttcagacaatgcgaaccaatgctatatgttggaatccaatggaggcattcaattttgtcatagcaaatgaagatcataacgcctattattatgatatgagaaatatgtcccgtgcattaaatgtgtttaaagatcatgttagtgcagttatggatgttgatttctcaccaaccggtgatgaaattgtgactggttcctatgataaaacgattagaatatacaaaactaatcaaggccattcaagagaaatttatcacacaaaaagaatgcaacatgtgttccaagttaaatattcaatggattccaaatatattgtaagtgggtctgatgacggtaatgttagattatggagaagccaagcctgggagagatccaatgtcaaaactacaaaggaaagaactaaattagaatatgatgctaaattaaaagaaagatataagtttatgcccgaaatcagaagaatatcaagacatagacacgttccaaaggttattaaaaaagcgcaagagattaagaatattgaattaagttctatcaaaagaagagaaatgaatgaaagacgtaccagaaaaaataaagaatttgttccagaaagaaaaaagcaaattgttggtactgtttttaaatacgacgataaaaagcatacaaaaagtaacaatgaaaataatgataattaaagttaatagcaataatatataagttattcttttctattcctgttcttattttttaactgtaatataaaatacttgcattatataaaaaaatataaatctttttttttattcatgcggttaatgtttaatagtctcttatacataaaaagtattatggacaaaatgatgtagttggtaagtttaactatatatatatttctatatattattagaaatgtctaccgaatttgttattatgatagtattgaaattacaaaaatatggacaaaagatagagtaacatgacaacttcaaacagactagagaaaacaaaagaacaaaatgggaaaggatataattacaaaatctgctctttgtaaaagtaagtcatggccagggttatttatcatttatttatatttattgaagaataaatataatagtaatgaagggaaaggagatggggagaaaaacaaactaaaaagataataactatcaaatagagacatctaaaaccttcccaacatcaatgatattttgcttagctaaatcttctaataaaggtattatatctagtaactcgttatcatgtgtatcagaaaaccatgaagatatggggatagcatgttgtggatgaaatatataagatgcaggggagttatccaatattatgatatccgaaagtggtcgacctagttgtgataaatttttaatataattaccttcataattatagcacgcctccctaaataatctatgatgtatagacttatgcttatcaagtatatctaacaagggatcaccatatctattaacacttgccgtaaaaaccacaacttcaaacaattcaccgacttttttcaaaaattcatcgacaccaggtctttttataacataaacgttatgcatctgatcatctatatctacaggtaaaacaaaatcagcagatcttaaatatttgaatgatgaatgaaccaatgtttcatctaaatctaatactaataattttttatttttaaaaacttgatcctttggagataataatgtattaaatccaggtgcatgatattgattgggctgcaacatggttaaatctacaaattcttcattttcatcaaatggatgcatcatatcataatctatatcatcattactattattactattcattgagatatcattttgatcactgctggaaattggacttggcaaatttgtagtagtatttgtatcagatatagttaatgttgtggatattacaggttcagtattgatattgttttcatgaatattattattaatttcattattagcatttaacgtctttggagtgttattgttgatagaagaaggtgctacaatgttaggggatggaatatcattttcatttgaggatatagttgttaattgagataattcattttccaaattttcttgttgtaattgttgttgttgttgctgctgatgcatataaccataatctgaacttccagtacttctatcagtctcatttgtataaacatttatggtatgtttttctttattctttagatattcaccatcgttatcgttattattagcatcataattattattgccattactattgttattattattttgattttcatttgagtttaattttgttttatagttatcattactaccgccaccaataagagcaacttcatcatcaatatccatatcatccgaatcttcataatctttttcttcatttgcatactctatatccgcaaggataacatcattatcgtcctttgtacttccccttttcataaacttagtttcacttttagtatttttctcactagattgctgttctttattgcttatcacaggtttatcaatatttctattatttctattcttatctcttttagatatcatttctttattttgaatggatctactattattatttgtattcttatatacactcaccttttttgagtaatctttattatcagttcttatatgactatttctgtttctattattaccactattattgttatcgatattatcagatgttatgtcactggtacaacacaaaatagatgagaataaactcatttatattaaaatagaataaagaaaagaatgataaacagagggaattaaaataaaaaacaaattaaaatgtaaacagttaaaagcaaagagggtgtcaaggaagaaataaatgaatgaatttggattgaaaattcaagtacctttctttagctcttaactcttatttctattagtttgttttttttatttgattttgtttagcagttttctcacacctattagtatcaatattcctaaatattaacagatagaataaattagtaaataatgtttctttatcttttatagccaatacgttatatctatgctaacctgctagatataagtaatagaaacagtattaataagttaagcacaggttggaataccaataaaaaaaaagaaggagaaaaaaacttcctaccgtgaacaactgcgaaaaaaaagagcgtgtttaaatctacaacttaccttctgacctacttttagttaatcactttgacaatattctggttttactctttctcataataaaaagcatagcggcatgcctaccataacaatatttacctaattatattacttctttcctacattaccaccattattaattaattgttagtcactttgcaacagagaaaaaaataaatgataacaaaactctccgtatagagtgatagatccagatgttgtccgtacataatgacactacgatatctttttcttactttttccttattccattgaagttttattacttgttgatgttgagaatttatctttgtattattagagtttcaatatattatacaataaagaactatagtatattaggttaatagatatttcctggcaacttaaataaaaactgttactgtttagatagtcccacattatattttcagtgataattctcttttatttttaatcattttttcctgaagttctttagaataccaaaacaatatccatcaactaaaggtgaaattaaattaaatctagtatggattctatatatgattttacgatttgtagctctccagtaaaacaactatctccaattcaaaaggatctgattagatctaaaattattaaagaaactccacaaagattttattcgaaccaaaatatttttaataaacaattaaatgttttaacaaattcatattcaatcgataataacaacactatccatgaaaattatcataataaatttaaacaaaataaaaatatctatcataatacccatagaaagactactactaatcgtaatgatcaaaacacatcgatttttattgagaatccaatcttaaacaaatttattgataagtcgattaataaagaatttgaatttcataagttaattattaatattatttcattatttataataactttatttattaaggtctttaaattggtttatcatatttttaataatcataatattagtagtaacatattcttttattattttaattataataccactaataacgataatttgaatactttgaatttttatctgattaaactcattaaactgtttcaaatgttatttaataatatcgataatatcaaatatttaattaattcaattatatcttttaatattatggtttcattaataaaattattatcatattcaaaaactagcagtaatgatagaaatagtagtaataactataataataataataataataataataatttcaatacttctaatattaagtcatacaatctttccgatagacaaaaagatttgctaggtttaaatcaggatgaagcatgtaataattataagaatagtaatcaatctttaatgaagaaaccgtacgaagttcaattaaataataacttgctacctagtcataataacaataagattaatagagttactgaagattcggagagtcagggaaataacctagttccaaaaacaccatatatatttaaatctttgaggactccattaaaaaaggatcttcaattacaatctcaacaagataataaatttattcaatctacatttagcaatcatttaaaagacaataccaatagcacatttaatgttactaatactactacgactaataatagcaataatctcaacacttttactactatggaaactccaacattgtccaataacaaaaaaatcggttatattcccagtaataaatatgcatatttaatggattcacctagtccaataaaaaaaaattatagataagaagggaaatgaaacgcaaataaacaaacgaatagcaatacccttttaaatcataatatacaacaaatataactatcttacttatatgtattcatatatagattttacatacagattaacttaccaataatctgggaataggaatcttaatttttcaagggtctcttttgacattgcatctggtttggttgaaattgacattttaattgatccagtcaaaccatcaccgttatttaaaaacttaggattcaatttagccatattttcaattattttggaagctaatttatttgcgtttctaccattgttatttaaatgaccgataactgcttcaacagagacaggttcttcatgatccatccatgcatcataatctgtcgacatacaaatcatttggtatggtaattcacattcacgtgccaatttagcctctggaagtacactcatattaatgacatcaccaccaagcattctatacatctttgattcagctcttgttgaaaattgtggaccttctatacaaacaactgtcatatcacggttgaagtgtaaatcacatggttcatttgtatcctgattgactaaaattggatcaacactaaatgattctttaactaggtcattaataaaattggcaatgttaaaagagaatggatcaccaaaaccaacatgtccaacaagtccaatatcattaaaatatgaagattcacgaatacctttggtacgatcaatgatttgttgtggtaagataaagtctcttggtttgatttcttttcttaatgaacccacagcactgaatgatataacagctctacaattcaaatgtttcaatgctgctatgttagctctgaatggaactctactaggtgggtattcatgatttaaaccatgacgagacaagaacgcgacataaaaatctctttcaacacttttagaatcagactttatattatcctcttctttcaagatgtacttagcaattgtgattggagatgatgtgactccccaaggagtgacaatagaatttaatctagcaataggttttaagcaatctaagtgataaagaccagtcccaccaataatacctaaatcaacttttccttcaaacttgttggaaacttcactgttggtcattttcaaaattaataccttttttatttgtataaaagtatgtctatatgaatggcacaagtgaattcaacacaaccataaaataagaataaaaatatataataaatatgtgagatttcttctgtctcttcacttcaacaaagctatgtacacattgtatataattaaaatttttctgtttgtttatttttcctctttttttgctttatactcgagaaaactcatcgcagaactttttgatacgaaaccgagaaaaagaaaaaagaaaaaagaaagaaagaaaaagtaaaaaattgtatcgtcataacaacggaaaaatagttgttacccttgttactcagagagtaatttgttcatttttttttattttttataaataccctacttcattttaattgaacaaaattgaaaagatgaaatttttttaaaataaaaacgattaaaaaaattattaacaacaaataagaaaaaataattatgaaagaaacgtaaaggactggagaaaaggggcaaagacaacaaaatgctattaaaaataataaaaaaagatcaactcaataaatatacgtacccttaagtgtaatcaacaataatatttacgtactggaataaagtaagcaaagcaatagatattaaatacttagtttacaagcaattttttaaaatcagttcagtcagtatacattatataaatatatctgtataataaacatttgatctgaaaagagaattgattaattgagtagtgatattttcatgttttcttttttgttttatttgcttttttattaagattagttattatacaagtactccataatgccgtctgattctatatattcctccaaaagtaaccagaccacaaacaccacttctaattttaatgagtctgtgcacaatgaaaagccaacatttaaaccacaatatttagtagattcagtcatctataattcctctgatgctaagatgtcttccgataagccaagatatacagatcctttaataagtccaatttctaaggagagcgcatcaaatgaaaacaaaaaaaggagaaatacccaaagtgtaccaaacaagggggactcagggcctgtgaggactgcatctatagtttattacgaaaatgaaggaaaaaagaaagatagtatattgaactcaaatccattaaacatattaaacgataaatttatgccatctggtatttcctcttcaaggacaaagaaaacaaaaagaatccctcaaaatattctaaaaaaaacgctgagtagtttatcaattaatacagataatgaaggtaactctattcttaatgatttagatttcataaataatcttacacgatccacatctaattataccatagtaaaaaccactagtcgaggatcgcaaaatcgaaatagtatatcatctcaagggcattctacctcaaaaatcttaccctcttctgtttctacaaatccttcatcctcttcatctcatcattattccaacattatgcatattccttcaaggaaaacttcatttgcaggttctattctaaaaagactatcgggaaatacctcttcatccggctctcattcatcaaatagaacaaaaagtaaggatacaaatactacatctaacaataatagtcaatgttccaccaaagaaaaaaagaaatcaggggataaaacatctatacctattaagaataattcatcttcattatccactcgaagatcttctataacaagtgtaagtgctgcatcactgaggaagcagagcaaatcatctgttttgactaatgattcaggctcatcatctgggagaaaaccttctgcaataactagtactgatactactcctaatatccctggtttacttccattagacacaaatttagacgacttgacagatattaccaaaacagcattacttccttctaaaaataatcaaaataaaataatgactaataatgaaaacaaaatactaataactgatgaagacaacattgttccaacttcaaatcagaagggaacagattttccaatagccttaaccatttcaagcatatctccaaaaacacacatgttcaacaaaatatccgttgttgatgttgacgataatgataaaattccaaatataccacaaacacagaatgtagattctattcttaaaacttcttctattggcaatgaacaacatttatcacatgacaaacattcaccaaatgagcaaattacaaatatgaccttgtccaataatttacacaattctacaaccagttttagccctaaaaaatcatactctgttggagattttactttatggtcactttcagctatgaatgattcagcacctggtttaaaaggtgataaacgaagcttttttggaaataatttaaccaatttatcaagaggagtaagcaatgtaacattaaataatgagaataaatggattgctccagagagttgggatgtagatcctgctgttaatagggataggcttaaaacaaaaaaaaaattgaagaaacaattgaggagagaaagaaaaaaattactattacagcaagagaaagataagcatgtcccatcaatgatggacccactggctagagcatcttctatatcattaagtctaacaagttcggcatcatcttatctagatacagaatctgacttcttgactgattctgattcatcatcaagtaattccttaccttcatggcatgcaatacatgaaggtaaatccaatcaagataaaacaataaattccaataacgttgatactgaaaaagtacataacatcacgagaccattacagagtttttcaacaaataacataaacttaacaacagcatcaccaggaggttttcctgccaatgaacgtggaaattcagttgatccattatcaccgggacctcataaatctattttaatgagtcattcagataaccctttaacacttgctactttagaagatgatagaagtgatcgtgcagaacgtgatttagaacattattataaagattcaagtgacttagattttaataagcattatgccattcgtatttttaatgttgatgatacatttacgaccttgtcatgcacacctgggactactgtggaagatatgattccgatacttaaaaagaaatttaatattacactcaaaagtaattatcaaatatcattgaaagttggtaaactgtcaaagattcttcgatctacttcaaaaccaatcattattgaaagaaaattattattgttgaatggctacaaaaaaagtgatcccttacatattattggtattgaagatttaagttttgtttttaaatttctcttccacccagtgcatccttctcatttcacaccagaacaagaacaaagattactaagaagtgattttgttcacgtcgatctaagaaacatgaatttaactactccaccgattattttttatcaacatacttcagaaattgaaagtttagatgtctcaaataatgcaaatatattcctcccccttgaatttatcgaaagctctattaaactaatgagtttaagaatggtcaatgtaagagcatctcgatttccagtaaacttaacagaggcatataaattggtatctttggagttacaaagaaattttataaaaaaagttcctagagcaatttcaaaacttggaaatttaacaattttaaatctacaatgcaatgaattagaacggttgccacattcatttgggctcctaaaaaatcttcaattattagatttatcctcaaataagtttattttttacccaaatgttatcaatgaatgtactaaccttttacaaatagatttgtcgtataataaaatatatagtattccacagagtattaaccaactgaccaaattggctaaaatcaatttgtcacacaataaattaacagaaattcaatcattagctgaaatgaaaaatttaagaactttaaatgtgcgttataataggataacaagcatcaaaacggttgcacctaatttacaaaacttatttttgacagaaaataggatatccaattttgaggataaattacccaaattaagaacattggaattacaggaaaaccctattacctctatttcattcaaaggtttctatccgctaaatatgacaagtttgattttaagtaaggcacagctatccagtattccaggtgatttatttactgaattatctcgattggaaaaattggagctaagtgaaaataatttaagtagtttaccaaaagaaataggctctttaaacaagttgatttacctatccgtggcaaggaacaaattagaatcattgcctgcagaatttgcacagttaaaatcattaagatcattggatttacactataataatattcgtgaattttttgaaggtattgaggaaattgaattgacatacctgaacatctcatctaatgcctttggtagcatagcttctatggacagcacaatgtttacaaaccctactggttctaacaaattattaaatagtttattatttcttgttgcagctgacaaccaatttacagataagatgttgccattttttaatagttttatcaatttgaaattattaaatttgtcttataatagctttgctgatatttcagcattgaatctaaaaaatctaacagaattatatatgtcaggcaataaaattagtgctattccaagtgaatgtgttttaaattggaaagagttgaaagtcttaatgttaaatggtaaccagttagtgacactaccagcagaactatctcagctatcacaattgactacctttgatttgggctctaatcaattgaaatataacatttccaactgtcaatatgattggaactggagggaaaacaaagaacttaaatacttaaatttctcggccaatagaaaatttgaaattagatcatcaacagatcatgatgatggtgttgactattccaatttgagcattttaccaaatttaaaagttttgggtttaatggatgtcacactaaacaccagtaaagttccagatgaaaatagtaacttccgtttaagaacaactgcatctattattaatggtatgcgttatggggttgcagatagtcttgggcaaagagatcatgtttctacaagagatgtgacatttgagagattcagaggtaatgatgatgaatgtttgatatgtctttatgatggtaaaaaccaaagttcagattacgggaataatatttcaagaattgtaagagatatatacgataaaatattaattcaacagcttgaaaaatatggagatagtaatgatgaagatatcaaaagggcattacgttttagttttctacaattaaataaagaaatcaacacgatgttgaattctgtagacaacggtggtgatattgaaaatttaacttctgcagatttactgagtggttcctgctctacagttgtttacattaagaaagaaaaaatctttacagccaatttgggtgattgtatggctattttatgcaagaataacggcgactatcaaactttaactactcaacacttaccaacaaaaagggaggaatatgagcggatcagaatatcaggagggtatgtcaataatggaaaattagatggtgtaacagacgtttctagagcagtaggtttctttgatttactacctcatattcatgcttcagcagatgtttctatagtaacactatcgccaacagatgacatgataataattgccacacacaaactgtgggaatatttaggcatcgagatggcatgcgatattgcaagagaacatagcactcaaccgatgattgctgctgaagtaatgaaagatcatgcaattgcatatgggtgtgcagaaaatattacaattatctgtctttcattacacactagcactgagcaagataatcaatttacattgaataaaagtgccttgttaacaagaagaagtacatttgaggatactgcattgagaagattacaaccagaaattacaccaccaactggtaatttggcagttgtgtttacagatattaaaaattcaacttttctatgggagatgttccctaatgcaatgagaactgcaataaaaacacataatgatctaatgagacgtcaattacgtatatttggtggttatgaagtcaaaacagaaggcgacgcgtttatggtgacattcccaactccaacgagtgccatgggatggtgtttaaatgttcaattaaaattattagatgtccaatggcctgaagaaattacgtctattcaagatggttgtttagttactgattccaatggagttaaaatctaccaaggtttatcagttcgtatgggtatgcattggggccatcctgtaactgagttagatctagtaacccaaagaatggattaccttggtccagttgtaaacaaagcgtctagagtgtcaagtgttgctgatggtggtcagattaccttaagtaatgactttatgtcagaatttaataaggtcatgaaatatcataaaatggttactgaagagggcaagtctttgaaagaagtgtatggcgaagaaattgttggtgaagttttagaaagagaaatagctatgctggaaactaccggatgggttttctttgattatggggaacagaagttaaagggtttagaaaccaaggaatttattacaattgtttatccaaaaattttagcaagtagacatgaattttctcaaaaggacacaaaatcaaaaacaattgatgaagatttattatttagtttgagaacaatatctaatagattggaaactatattatctgctctctcaggtagtgcattggaatttgaaaatatcaaagcaactcataactatttgaattctgaggctaaaacggctattgttaaatctgtgactgagaaacaattattggcattttttgaccacatggttacaagaattgaatctgcagtagttttgttgcaattacgacaacagatacaagacggtttggatttctgtgatacaaatgatcatagtgatctttcaggtacaatttttgatttacttgacgaggttctggctgattataagttaaggaaagagtagtacagaaatttacttgataaaagagtaaacttttgaatgctttgaaaaatatactaaaggtgtacataatacttcctcaaaaaaaacattttcagggcttgtatatacatatgtcaatatgtagaataataagtaagaacgtcctaattattcttttttttttaattaattgatgaggaatggatgatattccacttgacctttaatcttatatttctttttctaaaatgagtattgggagcaatgaacaaaatatatttctttatgtaatccatgttatcatactatacttcaatcgggctatataaacttttagcttttatcttattcttgcattcacgtcttgcaatctttgttatattcaaatattacttaaacatatagatattcttctagggctggttttctaaatcttttagttcgattgtgttattatttttggatgcattgatatcccctaaacctgtagacatatcactgacttcaatcattccttcaaaaaatgtatcttttagctctctccatctggaagtccatgtaccaaggaagattaatattaaagacgaaaatacttgtaatattacccatgaaaatgatggcaaagcacctgtataaatacaaactacaataaaattaattgcgtgaactgttattccaaaatcccatgctaatttactccttcctactattacggttaaaaatataacacaaatcagtgaatcaacaagccacagtagggatagcgacaatccatatccatttgtaaaatcaatgtatttggaagaaaatagccaatcattcatttcaatattatgtccaactagtttggcccatccatagaaaagaaaacaagcagttacataataaaatatttgcaataaaacaatttgaagggcaattttactaggtgacaatgaatcctgcttaaataaatccgatggtctgagctcttttggaagccttatatatcttcttaatgaaaacataacttttgtcaatttaaagtatttttgtacgaggattggttagaatatctgctcaatctgatcggtctaagcctgttcagtctactgattaggatcaaacgtactcaattaaaaatataataggaactacctttaggtgattaagattttatcttaatttttttgtactttttttttattcgtaaattattctttgcttttttttgtaatataggtattattttatctttcttatttagtttataaaaaaaacacataccaagaaaaaaatcaagagattctttgatgatttcaaattctattacctcaaaatacttttaaaaattctgaatgcaagggtttctaagtggatatagggaaaatatctagcccttgtaaaggtaagatccatgatcattgcatttgaagacttaactagtgcacatatagatatttagatagacaataactagcatcatcaagtctatctaaaaaaaataaggtgataataactattgctagtgagattgagttaaaaatatagattgtctattgataagtagtgattgtatatcaatgtttagtgatatccttaccttaccactctaaatttatatagatgtatatttatatacttgttgtaggattgaatctatttaaagttatttatcatacgatgataaggaaggtttgctaaagtctttttgaaaattctgaaatcatcggtacattagatagcatttttttgtatatcctttgtagaaaaaccattagcgatgattatgttcattattgatgtatcatctctagcgcattgaaattcaaatgatccaatgtaacacaaaaaaagaaaaaatacaaaagttcaaaaaaataaaaaaaataaatagacaagatgaagaggaagaaaggaaaaaagaaaggggttcatataagctctttccttatttccacgtagtattctaagtgtgtaaatatttgtgtctgaagttcttttcaatggatcattgtgttatttgtctgaaaaattgacatttataaatactattagagacgttacgtaacttttgtttttttgacaggatagtatgggatttggtaataaagtatttagatctgcaagacaacaagcagcttttgataagtctttagctggaaaataccaacgtcttttgaaaaagaatccttttcttttttttggtgtaccattttgcagtatgatagttataggttcttattggctggccggctttacatctgttaagtatgagagggaggatcggagaatacatgaatttcatgaagaagaaatcttaacattaagaaagaaacaaagaaaggtagatgtaaaagaggaatattatcgtcttcaaggtttagcagatgaagactgggagccggtgagagtagaacgtctagaaggagaatcagaaaatgtttggtaatatataataaaataattaaatcaaatacataagcaactgacaaagaagactctaacattgaattaagaaatacagcactgctttaaattaatgtgcgtttgtttgaagattttttaaaaatagaacgaaatcacatgtttgttaagaaattatctattttactcaaaaaattcctaaaattgatatcattttcattttagatggagtattcatgaaaaaattagttacttatggtatgcaccatatgccatatgataataagcaatgttcgagtaagtaattgaagtttttaattttttcctctaactagtttctcttatagtattgtaaatttattaaaatgaagtgtattccagtattccaactttaagtatgaagcgtagcttatttcatgctcaaaatagtcaagtgaaatctcatgattttattcttggaatcttttatctatgtgaagtaaactggattaaatatttaatgtaataatgctaaataaggaaattgtggaaatgattttagtgcattatatatatgagtggaagaaaagttatttgtctctttagtatttttctaacaaatataaaaacttatgattctttaagaattatgaagaaaagatgatcataattatttgaataattattgcttctgccttacgcaatcagatatgtttaaatcagcaagttagaaatgatcttctgaattatcctatatgaatatacaaggtaacacatgaacgtcacttctactgttacaataatctttaaaatatacatatttgaatacaaaaaccaaaacaaggatagtgctttgttcgtgcgatctttttacatacttaaaggtgtagtttttttttttttattcaggaacgtgatatttcaaaaattaacagccagtctctgtactaacaacaacttaattgttacaatttattagatgtgaagtaataagttgtgtgttataacagaaccagataagctgtatattttacaagcattatatacaaaactatgtaaagtttgtataaagtgaaatataaaagtaactatttcgaatttttgtatcctaactattaataaaatttctactatttctcaaggtgctatttttgttatttattaattgaggtacatttttttacctatttttccattaattattgtaattaaactttaaattcgttttaatttccaagtatccaataaattgttcccaacttatcttgaacagttgttccttgttttaatttcattatagagtttgtgcaattaaagttgataatagtgaagaattttgtgatagaaaattgaaggaatttttccaatccaaaggtattaaatattaattaacgataactctaattttattattttaagcttttgcatagaaacaatttattacattttaaacttttatttgatgatagctgctactaccacaatagttggcctatcattgtcatataaatattttcttttgtttctccactattaaaattttcatataaagagattctctttattaaatcccttaaaattatcttattttgatgttacttatagttcagtttttacttctttcaaacttaatttcatttccagaattttaattatcgttataggaattattttagcctctaataatttatctttttctaaactatatcatttagattatgacccttacagcactgttaacttttctttaaatacaaaaaatcaccatgaaacaataataagtggtattccttcttaaactatcaaatcataatctttaatttagtgaaaaacaaattggttacttatttaaaaaatatacttctaatttttgttttgtatttttctaatataatacatataatattcatcttgtagaatatttaatttcttgttaattactatgttatactcaaatataaactttacttaaaactaaacctttacaagaattcaattaattttgatgtctccattttcaactttcaggtattatttgattatttattaatgtatttattattaataaattatatacagataaaacatataaatataatataaataaataatgtaattaaagggacaataatatgctaatattattaaaaactaacattcataaatattccaattacatcagtattagttgtaacaaaatgtataatattattccaaaattcttacaagcattaaactttctgtcttatattattctaaccaaaatataggctaagcatatagaattcatatatttatctgttaaaccaaaaccattaaactacttgaccacaattttaaatcattatcaacattacctaatttctatgcaaacatcacatgatataattttgaataatatgatgcgtatatatattgttttttttcttttttattttttatatccggtttgtcttttttaaatatctcttcgtttgtagtgctgttacaaatattttatggaaatatagtagtacacgatagctacattacaaccctaatgagggtttgggatttaaaaatcttacagaaaaattgtttatttttattttattttactttttccccatttgaaagagaagagatattttagtatgaaagtaagcaaagtaggtaaggttgagttatttatacaccagtgcacaattgtgatttagtatggaacatatatgtaaatagtgaggtttagatgaagagagatatataatagaaacgatattttattagcaaattggcaattggggatttggagggcaacatttccccctcccctttcaccggatcattcagctactaggcagttaggaagcagtgataactaagataccacagtcctatgacttttgtccatcctagcaacagacatgttgttcctttagataatatacacataaactatatagaaggacagctataaagaatattacagcacccagaaagaaaaaacctggatatcgggtactaagggtacagatgataattgcaattaatcatgatgaaatcaagatgcacgcccggagttgagtgagtcgaatagtacccgcaacaagcaatcaaaaaataaatatgaccaacgtttatagaacgcaaagatggaacaaactaaataaaagaaagtacaaaaaacataaaacattacagggaagtcacaggaactaggatatcgagaacgtcgtaacccagtaggatttgttgataatttacacaattttgatgacaatgcataaaagaagagcagagttgtgtgaaaacagccccaatacgaaaaaagatttacgttcctacgactgtttgcctaagatgatcattaccctcaccaccattggtagaatcaggagccttgaacagagccctgtagagaacaagtccacttcccagaagtatcgagtccttaaacagttgagatggatcaacatgagatactcgggccagccatcaaaacactacatctatttacaaaaaaataagttagaaaagaacggtattaagatagagcattcctttgatttaggagctcttgtatatacaatgggtatcacacaaagtaaaaagatcatgaggcgaggaggaaacatacattaggtaaacgaactggacaaaagttggagggtaggaaaaaaaaagagcgctctttattttttttttctttgtatgtttcttagttaagatgagaaaaagacactaaagcaatcacacgatagcgaattaaggttctaggttaatatacaatggacaatggacaacacattagaaaatggatgtattgttagtgggattaggaaagaggaataagagacataaaaaagtagcgaaaagaaaattgctagatgataataatacagaaaaagtgaggttaataatgagattgaaaaagtaaaatagcgttaataatgtggagtagccataatggatggaagtagaaaatttggattgaattactgaggtgtgagagatacttttttttagcgggctatatttttttttctttttttttattttcatttttgttataactgttttttattataacatttttttttttttattttattttagcagtgcactatttagataaactgggactagagaattaataatatgagagatatagaagaaaaaaatagagatgaaaaaaaaatcaaaataaaaagtagagatggaggaggggatggtaaatgaaaagagagagaattggaaacgatttaggatgttgttcattgactaaccaaccaatcattcagatatacattatagcataagtatgcctcttagatcatgaagcataaaaaaaaaatactacgagatataattgacttttgttatgccacccagaggaacagaaccaccagttccattaagatgtgcaaattataagccctaggagtatcttcaacttgttcaatattttattacgaataataaaataaattttgatcaggtaggaatagaaccaccagttccatctgacaaagagagccgcgagtcaaacaagaatccaatattcctatgtcaattattatctctgaaaaattgtccattaaaaatctcaaacaccattttcctatttcttggcttgtaaattcaactacaactgtaaaatctgaaatcatgtaaaaaaaaagcgcctctgtaaaactatcaccttatgagtaatagtggaatcaagaactaaattcaactaataaaaaatatcttcctcaaatcctaaatttgggttaacaatagtcttgaacttgcataatggcaatccacagatcctattgtattcactctcttggaatagtaatggaattgaataaaattaaacaataaaagggtaaaaaaatctccgaaaattctctagtaataaaatatataaaaagtctgcacttgctagtatcattctcacttgttggttgcatatatgtcacagcatatatatatatatatatatgacctatattgtcagtattcattatatcaggataataagggcttgtatccacccatctacaaaacatttttgccatgactgctattgagtattagtattaatattattatcgtatgtctgttagtattgtaaagtaatgtgtcctaatcccttgggagatattcactcatcttaacggatctttttaccacatgtggtaacaccactggatatacaagaactactatgccattagaatacgctatcctaacacagtccctccaacttagtttttctgtaaatagacgggtccctttggttgaattcctagcactcacatgaaccacccactctcgttgattctttcatgtaagaaatggaatcctctataaggtcactgtcaacgtttctaattctcctagactggatttttgggtatgtctcttagctacaggtcgtagcccaccacttttttagtataaaggagaacaattgttcttttaacatttccactatcagcttcacagatcaagctatgtattattatctccattatttcattattttagaatcaaactgagaaattcttttttttcaatctttttctttgtgatcattctgacatgttatatattttcaaaattaatttactttttcccttccacttttgttttctaatagatgttggacatgttcacttattggttgggtgtgacaggagctattggactggtttctttgtaccttttggaagaaaatgtgtatagagtaaacacctattcctttaaatattattttgtgtctctttcttttttttaaaaataaaaaaaattaatgtcagtgttttcccgtaatattgaagaagtgacacaaaatggagtgctcaacgacaaaataatgatttttgcttttattgcattttaaaaagaaaagacacagaatcagggagggtaaaaaagaagaatgggaaatgtggtttgtaaccgtattacttttaaaaaacacatattgttttttattatgccagagaaaacagtaatgatagcagcaattttgcgacaaagataagagaaatttgggattgaagagtttgtttttgtctacagctataagagtttacaccattaagaaaagcttgctataaagttactttattcttcttttttcttttaagaatcttaacaagctattttggatagaacaaaagttattacgtttgttattccatcctgtatgattagttgacttttaaatgtttaattagttatatgtagagtctactgtaattgtacccttgagttgttatgtagttctcagtaatttgaacaaatgatttttttaaggcttctagccagtatttttagatttgttttcgaatgttgattttgaatagggcaaaattttgtgtctaaaattagaaaacagacattgcactttaagctattaatcaaataaaacacatgaatgaaccccttccattttgggaattatgtaaacaaagggaacaaaataaaaagtggttacaataaaggaaaagttactatttctgttcatttttgttcactttaaaaagatattactcggcggctaattttactagttacaagatgcaagataaatctgcttccagttttgataatccctaaatcatattattgtttgtgtttagttttagtcttacctatacctatatatatttatatatataatccaactaagagtaaacaaacatcggctttccaaataagacctcacatcttgaaaagtattttattttctttaatcttgacctttattttctttaatcttgaccttaattttctttttcctttcattgtaatatcggtatatttacatacatcttactcttacatattattataatactcaaggttttatttctaactatattcgaactgactgacaatttatcacaccaagtccacattaattattttatagaataataaatccgactgtcatcaaaagtttctgtttaaatgtgaagatacgtctgactctagtcaaaataagcttgttcaaatagcataccaaatactttagacataatgatatggcgaaatttttatgagaacatagtaatgtacgacatatatgtgagtaaccctaatgagggtttgggatttaaaaatcttacagaaaaattgtttatttttattttattttatttttggtattatagcagttaacttttttcatgtagttttggctcaagtaaagttatcatgcgctaggaatttttttcattttgaaaacttcttggttaattgtttataataaattaactaaaatgatcacttaagcgattacttagtatctaagttgctgatttatgattttttaatgtatatatggattagcatattcaagatgtttatttctggaaatattcctgagttttcataatagaagaaatgttataaataaacttattaaaggatggctataaaagtagattaaataaaatattgaatttatgaaaaaatacgtgtgaatattagtattctcaaaactataaacttgtatttttttcatattaattttttcctatattataatgagtattctgatgatcgaccttatttatttactggtttctccatattatcaaacaattattttaagacatcatggtgttatatgttattctacaatattatataacgttttacaatcttccatattgtttcttgatattatgtgaacttattcctgagttcctagtgataatattttgaatataggctgagtgtttaaggttaactaattttaactattataattatatagattattcatactcaattgaaaccattcttaacatactccttttttctgattttatttactgtttttaattgaaccttaaaacataaaatctttcttaacggagcaaaacctatcttccgatttttttttccccctcttttgacacaaaagttggatttcttgtcctaattaggcaaaaatattccatattcctatcactcttgctaacgcggagcaactgtttcaggctttttttgtgaaaactgttgatagcgcatcaaaaaatttttttttatcaatgcgatgagcttcgtttttactaaatgaaaaaaatatatattgaaagcttgatcagtttgaactagctttatagaagagtgcatctattttattcctcaagaacaagtttcaaaaattcaataagcataacaaactttggtagttgtgtttacttttattattgactactattttacaatagggagaaatgcctgaagacgtgactagttattttggctctacaaatccgtcccatagtcaaccacagagtgattatcaatttctagataatgtttcttattcaacttcaacaagataccaaaaaagagctgccaaacgtgcttcttcattggagaagaattcagaagaaaaagacatcccttcgactaatgtttttgatgaagaaatagtaagttttgaagattcagaatctcgacatgagtatgaatttaaaaacgaatcaaaatggatgcaattttattatcaacatgttgtggtagataaatcaactattggtgtatcaattttagattccttcatgtataatagtgacttaaaaccagtagaagaaaatcgaagagtttggtcttggctaaatttcagttatttttggttagcggaatgtttcaatattaatacgtggcagattgcagctactggattacaattaggtttaaactggtggcaatgttggattacaatttggattggctatacttttgttggtgtttttgttgctttagcgtccagaataggtgctgcttaccatatttgtttcccaatctcctcaagggcatcatttgggatttttttctctttatggcctataatcaatagaattgtgatggccattgtttggtattctgtacaatcgtggttgggtatggaacctgtctccttaatgttaagagctatttttggtaaagatttaccaaacagaattccaaatcattttggatcttcaaatgctacaacatatcaatttatgtgtttttttatattctgggcctgtgaattaccatttttatgggttccaccccacaaagtcagacatctgtttaccatcaaagcaatactggttccatttggcgcatttggattccttatctggtctattagaaaagcaggaaacaagattgctctaggtagtctaactgatactcacccaactggttcggcgttttcttgggctttcttaagaagtttgttaggttgtatggctaatttctctacattagttttaaatgctcctgatttttcaagattttcttctggaaaacaatctgcactttggtctcaattaatatgtatccccctactattctctattacatgtttaattggtattctagtcactgcagcaggatacgaaatgtatggtatcaattattggtcaccagttgaggtacttgaacaatttttgattagagattacactaagggtactagagcaggagtttttcttattgcatttgtatttgtggtagcacagttgggtgccaatatttctgccaattctttatcttgtggtactgatatgacagcaatactgccaaaatacattaatataaggcgtggatctattttttgtgctatgatggccttatgtatctgtccatggaacatgatggccacttcaagtaagtttactatggctttgtctgcgtatgcgatttttctatcatgtattgctggtgtaatttgtgctgattattttgtagtgagaagaggatatgttaaactaacacatctttattcgcatagaaaaggttctttttacatgtatggtaataagcttggtattaattggagagcatttgttgcatatttctgtggtgttgcaccaaatctacctggatttataggtgatgtgggtgctccaaaaattactgtttcaataggagcaatgagagtttattatttgagttattgggttggttatggtatcagttttgttatttatttaattctatgccatttcttccctgttcctggccaacctgttaaaaatatatttacagacaaaggttggttccaaagatgggtcgatgtggaagattttgaggaggagtggttagcctctttagaaaaagaggatctctcgaatgatgtcattagtgtctatgaacataaaaatgaaaaaaaattcttttaaaatttctatatacattctatggattataatttcagacttcaatcactgtaatattcgtattttttaaatatttcaaatttatgagttcttattctacttatatagtgcatttcattaaaatatactgtattttcatcgtttcatataatcataacaaaatcttgatttatgtgtcgtttgtcctcatttcagatagataatatttccaccattcttcaaaaggttgatttttaaaattcaaaatacgatgaacattttaatgtcagccaatttatttggtagagtgtatctaccctgaaatactaattataatcatatctgtcatatgtttttttactgttaacttaaaaaattatttatgacatcttaattttatgttacgactttttctatttttagatttttgagatatggattattataactttttttttaaaaaaaaatgaataaaattacaccaaggaacaagaaaatcttaattgtgtggagtatataatgaagtaaggtaagatcttttgtaagaaaggtatgcatccattaaatataatcaaatattaaagaaaagatcaccatcagctattaaagttgtgatattgtcttgttgaaacatggataatgatgattatgtactcaactgggaagatgaaaaccttctgcatcctagaagaaacagatcatctagaatcccaaatagacaaaactccttagttagacctgaaagaaacagattgaataatcctaatgatcctcatttttactatgcacagacagctagagcgaatagccaaagaattaatgtccaaccttctaccacaggtgttaatccaagatctgaaagtttaagaggctcaattcgctcttcacattctagaaataaaaataatacaacaaatactccagttacctatcctttggatgatcttaatcatgatggtaaagctgataatatcgagagtgtgaccgaactgggtgaggatgagaatgaatcaaattctttatttgaagaagaccctattttcccttcactaagaaagaaaccaactagaattgaaacttctaatagcttttctctttggaaaatatattatcgtgttataaccttttggataccagggtttgtattagctttgtttggtatgccagacaaacaaagacagatggcttggagagaaaaaatcgctttattatcaataattggatacattggggctattattgcctttttaacttttggttttacaaggacagtttgtaaaaattcaggagtgacagtgaaatatagtgatgtttcaacagggtatgttacagttaatggtaatgtctatctttataatggtacaagcccagcaggaagtgatttgcaagccaaaggaactaatgctatttatggaccctggtacgatgcaggtaaagatgcttcatttctttatcaaaatgttaatggaaattgtcatgatattattgtacctagagataactgcactatcccacacgattcaagcaataatttggcatggtattttccttgtacattaattaaccaagatgatacatcaaaaccaaattttactcaaccaggaccttatgctggttggggctgtcatacaacagaagaggaaagaaatgccttttataaattaaagccaactgcccaaatatattatacgtgggatgatttgcggaactcttctagaaatttagtagtttatgatgggaatattcttgatttagaaaaactagcttggcttaatccaaatgaattaatatatccagttatttttgatgaacttcgcaatgctagtttacaaggttatgatctatcattagttttatctcatggttatgaaagaaaagttgccagatgtttgactgaaattattaaggttggtaaaatagattctaaaactattggctgtattgcatcggatattgtattgtatgtctcattggtgtttattctgtctatttcaataattaaatttctcgtagcatgttatttttggtggtttgttgctaaaagtcaaggtgcttcggccattgataataagatgctaacggaacagatgaacaagattgaggattggtcagaagatatatttactcaaggtccaattaaaccagtacctccttcattaagaccaaaatattctatgtatggacacaaccggaatgattctacttttaatttgattaaaaaacagacatctagaatgctgaatttaaatgaatcaacgatcgatcttaatgacgaagatgagaacttggaaagttcaagatataaaggaatgacaaccatgacacttcagcaagctcagaaagatacagacaaagaattagatggcacttatagtcgttctaggagcggatcattcttattttcgggagcatctcaacatcttaattatccaattgttcaatcaagtatggcaataaaacaattagacacatcgaatattcatccagatatcgtccagcaacctcctatcaattttgtaccttttggatatcctttaattcatactctttgttttgtcacatgttattctgaagatgaaaacggtttaagaaccacattagattctttagccactactgattacccaaattcccataaactaatgatggttgtatgtgatggtcttattaaaggatctggtaatgataggactacaccggaaattgctcttagtatgatggaggattttgttgttgaaccggaaaatgtgcttccatactcgtatgttgcggttgcctctggttcaaaaagacacaacatggctaaaatatacgctggattttacaagtatgatagttcgactgttccagaagaaaagcaacaacgtattccaattattacgattgttaagtgtggtacaccagaagaacaaggttctgctaaacctggtaatagaggtaaacgtgattctcaaattatcctaatgtcatttttacagaagattacctttgatgagagaatgtctgaattggagtttcaattacttaaaaacatttggcagattacgggtttaatggcagatctatatgaaaccgttcttatggttgatgctgatactaaagtcttccccgattctctaaagcatatgaatgcagaaatggtgaaagatccatctataatgggtctttgtggtgaaaccaaaatagctaataaaagagactcttgggttactgctattcaagtttttgaatatttcatttcacatcatcaagaaaaagcatttgaatctgtttttggttctgtaacttgtttacctggttgtttttcattatatcgtattaaagcccccaaaggttcagatggatattgggtacctatcttagccaatccagatattgtggaacgttattccaataacgttaccaatactttacatatgaaaaatttacttttgttaggtgaagatagatacctttcttatttaatgttaaagacatttccacacagaagacaaattttcgttcctagggctgcttgtaaaacagttgttccagacaaatttaaggttctgttatctcaacgtcgtcggtggattaattctactgtgcataacttatttgaattagttttgataagagacctttgtggtacattttgcttctccatgcaatttgtgattattattcaattgattggtactctagtcttgccattggccatcagtttcacggtatatgtgattatttttgctattgtatcgcatccaactccaattttaactttagttttacttgctataattttaggtcttcctggtgtgctagttgttgtcactgcaacaaaatggtcctatttaatctggttagctatatatattattgccttacctatttggaattttgttttacccgcctacgcttattggaaatttgacgatttctcatggggtgaaacaagaaccattgctggtggtaataaagcaggtggccatgatgatgcagaaggtgagtttgactatggtagaattcaaatgaagacctggagagaatatgaagcccaagaaagattagaaaagataaaaaactcaggaatacctgcaaatatgaaataatatattccatgataataatataaattgtataatattaaaatacttagaatcttatctatgtatacatacataaggacatatatatatgtgtgtgtgacagaaaataacctgtaatatcgtcatagacttaacgaaaaaaaatagtcctttcactatattacataaactgtaaagtcttgtggggacacctctaataattgctctgtattttcccaaggaacgccaaagataccactattaattttaggcataataatctgatagtcttccagtgttttttcttgattaagttgtgatgataagtcttgtaaagccatcttagtatactttagaatgtaactctcattttgatcagatcccccataagcagcggtaaagagacagccaataattaagtttggatcttcctttgttctcaacaacaaacatttacctaaaagtccaacaacatgtctgtcacaagcttctctatactgtttttctgcataagggtattttaaagctaactgatatgcaattcctcctccccatgtaccattacaattgcaagaatgcaagagtattcttggaaaatcccctgcatttaaaatatcacctttcacatatttaatattacccatttttgtctacttgtcataaactcgatctaatttcctaaccaaggaaacgaataattaagcagtcaaatatgtcttctatttatttcaattcttttctttcagttaggttaagtaaaaaaaaaaaataaaaagagagaccattcgtttttatgtaatcataattttttcctacttctgtaaaaaaaaattataatacattatcaggtctaaatgatgtactaattatctttaagtatatacaatttttaaaacatttatataaataatgtacaattacaaatcttagaaacttatcatattttgaatatcggtgaattatttctaagtgctggttatttgaaaccattcagttattctttgagaatgggttggaaaacgaaatgccccatgaaccattaccttctgacttgtgaatataacttacgactactcttaaatatttaacaaataagaaacccatggaaccaataactctgaataaggcaagacctgctacagaccacaaaacaaattttaaatagttattattagcgtcctctggttcgtaaatttgaattatagacataatcaatattaaattcgatagcatccataccataacaattcttgttctaacatcccggtaataatcattgtgtttttgggcttcgtcaacaactttttctttaaattcaacttcctttagacgactctttatctccatgtattttttatcaatttcttgaggccaatcagtttgaacgatttgtttgccatcaggaccttgcaccacaattgcagaagatagttgtttagattcttgtgtagaacctttagtaccccatgagacatcatgtgtattacaaaaagcatagatttgtaaggtacaagtaatagcaggtaaagtagcaaaatattgaactgaagaagtaaatatgtgccatggatctaaatacataaatgaagaaaaaacgtataatccatatgttgaaagaatagacacaatgatgttaacaaaagtatcatgagtctcatattgagatttcaaagatctagctgcaaagacaaaaccacatattagagaatatagagcacagaatgtcaaaataatcattgaggtaatgtaaaggtgtttaccaccctgtggacgattacccatagatatgatgaataaactagccaaatcacagaatattaaatattttaggaaaatgaacaaaggtttaccatgttttataatattattcattgaaccagctaaataataaaatgttaagacaaaattggcaattgaaaaccaggaaaataacatctgtatgaattgataaaaaaattcaatatgaaagaaaaacattcttgttaaagagtgtttagtcttccaaatctgagcaaaatgtaattgtgcataaagtgcagcaaacatagcaccattcaaccaacgtcttctttgagaaatgaattctggaatatcttcaggaacatctgtatcaccagttgcttctttcacatatttcaaaacccactttgcatttcttttggcaactaattcccaacataggattctatcttccgcaagatacatgttagcagtaaacacatcatggcttctaccttcttgtgtttcacctaggaaatatgaattaagtggaccagtaccatcttcatgattctgtaaagcacggtatctgtatgcagataatgcacctggaagcactgtgatgtaaccaaataaactttctattggtttatctaatatatttgacattttatattcgaagttttgggatgctattaatgggtttaacaattttctaccatatttccctttcatagccacaatctgtcctgcagcaccagccacattcgaatcattgtcaaaggctttccatagatgataaatagcagtgtcattcaatctagtaccaacatcgacaagtattacaacatttggttgtaaaacaggacagaaggcattgaatagccaacgatgtgaattaattttctttttattttcttctttcaaacaaaatacaaattgaactggaacaatgttctctgaaacataatctaatttttcgttaattgacacttgagtggttaactcaaagatgtgagccttaaccggatcaccattaacagatgcttttgccatatcttcttgatacacaccaatagcagctaaataatctaaagaaccttgattgactttagtcctaccgtcactgactaagatcacagatactttcttccagccattgacaccccatatatgagattttctacgattacataaatgagccacatttctcataatagaatgaatggttctagcgatactaaatttatcctcattatacattgtaatacacaccacaatttgacattctctattcatttcagcaaatcttaaactataaccagcttctaaatattcatcaggatccacagtacatgctgtatatctcatttctgtaaactcaggagaatctcttcttggcaaagtactcaataatcctctaggtattggattatctaatttaagaatggcctttttcaaatcagaatcactagcttgcggtcttcttttgctttctgagttggcccgtctgacatagtctttacgaactggatggtttaattcgaatcttgtctctttgaatgtttcatctgaaaatgtagattccatatcagtgtcatcaaaagatttgcgaaatttctcatccccaaactcaaaagatgaccttgcaacagttgagtctgttgatgcagtcaattttgaactttgtgaataatttcttgttccaaatagattatttgaatttggtttaggaatagttggtagtttaggataataagatcccattatatgatcattattaccatcatcattatcttcttcttcttcttcattatgacacatcaccccaactggaggcaatgtatcaaccacaacagacttttgtggtgatctaattggagatttttgtaaatcatcagtatattgccttatcataggagatttattagattctgcagagaaatctataataacatcattaactcttcttggggattcatttaaatttgtcatgtatctatttggatttataggggagctaggattactgtctctataaaattgagttctatgacgacgatcaggagaatatcttagagcagctttcgaaggagactgtggtaatccttgaaagatatttgaatcattattatctgaatagtttatatcatcatcgatattagtacgagagttagtgttcccaaatgtactattactactatttgtgtcaaatctagttaggccgtttcttacaggagatctaataggagacccagtggaggaatccaccataaaaggatttctggtcattttttaagcaaaagttattcttgttatattttgcataaaattttatttttaaaactatgttaccgtaactttgaaatgattttgatagacgaaattacctttaaggctggtccctgaaaggtagtcttgaaacgtaaatgttaaaaaagattgaaaagatatattaagatagatataaagtctgttaaaatgtactttatgagagtttcttcaagtgacgactccccaaagatatctttcctaactgtagtccacactacttgaatcttacaaaaaaatttcagatcgatcaaatttgatgtttttcctaaagaagtaatactataaacaaaccctttaggtcaacttttaaccctactatttcttgttctaaccctaaacataatgcggattttttttttcattttttttcgttttcctccatacataatgaaataaaactactttgaaaattgtaaatttgtaagtgaggagtgtctgaaaaaaaaaaaaaaaaaaaaggattaataatttgtatcgaagatatatctagaagttgcaactccgtacaacgattaattagtgattgccagtaagctgtatcaatattaatattatcaattaattacatatttctactggtaataaagttaataagattggaattgatcgccgtaaaaagccatatttcttaattactttattcagagagaaatttattatcactatttatatattggtttcagtcggattttaacttaaagatatgttcaaaccgtcagtgagaattttgaaatatcaagtcacatcttccttaagagtatctttggtcggtaggtctattcaaaaagcattctcaactacctcctttaggttaaaaaacaataaggaaagtatcacaaatgatactaatattttaaatgagattaaagatatcccattaaaggatattaaagtaaatattaaaaataaaatagatattcctactacggatccaaccgatggatttatgaattggaaaagtattggtttatttacttttgtaagtggtggtctttactattgggcctataataaaaagaaagaacttgagattattaaagaagatgaggctaatagagctgctgtcggaggtccttttaaactgattgaccagaatgggaacgaatttactgaaaggaattttttaggtagattttctctattatatttcggattcagtcattgtccagatgtttgcccggcagaattagataaattagctatctggattgaaagaattaaaaaagattgcaatgttgatgttcaacctgtatttattacctgtgaccctattagagacacacctgaagttttgcgacactatttaaaggatttccatccatcaattattggattaactggaacacatagtcgaattaaagagatgtgcaaaaattataaagtatttttctctactccagctaatgcaaatccaaaggaagactatattgtagatcattcagcttttacatatgttatcgatccagaaggtcagtttatggaagcaatcggtacaatttatgatgacgatgaaggtctagaaagaattgaacaacacattaagactttcttaccaaaagccgaaagagaaaaaagattgaataaatggtatgcatttttattcagataaaagaatttatgtactttttaattaaaactgtatatatattaatgaatatttattgttgttatagttatgaagcagtgtaagtgaatttcttgtattgatcaatctattactatacactcatatcataatggtgtagatataacaaatatcttctgttttcttttctataagaaaataaggtaaaaacagaaaaacaaaaacacaaaaaattgccatagtagaatatttaagtgtaaaaaaattaattagtaggtctaaagatatttatataatgaagatataaagctaattaatcaaaaacataattatatagagaggtagaaataaatatataaattaataaactgaagaaaataaggactaactaaaagacttttaaaaagataaaaaataaaaaaaagagtgtgattttattttagtattttttgttatctttaaatcaatttcagttcttacctgcaccagctctaaagtaaataatatcaccatcttcaacaacataatccttacccttttgttgtaatttaccagctgctttaatagcagcgtcatctttatattctacaacatcttcgtatttcataacttgagctaagatgaaagtgttcattaagtcattgtgaataacaccagcagcttgtggagccttggtaccctttctaatagtccattcacgaacttcatctggaccacaagtgaagaaagagattaaatctaacttctgtctcatagtagtaataatctttggtaaagcagattggataccaagttgttttaattcctcagcagcttcctcttcagacatgtgagataatctttcttctagagaaacagaaaatggaatgattaaatcacctggagagttggcatcaacccattccttaattcttaacaaatgtttgtttttctttctgatgtaatccttttcagaaaggttaattaaatagatacatggcttagcagtcaataaaaacatggtgttgataacctctacttcctttggagtccatgtttggttgtagactctttgaccgttcttcaatagggcgatgattctttcaattaaggccatttcttctttcttttgtttgacttccaaagattgaccacctctcttggcaatctttgcggcagcttcaagagccttttcagagaattcgatatctttcaatctcaattcattagaaataatctctaaatcacgaactggatcgacatcaccttcaatatggataatttcagcatcatcgaaacaacgtaccacttgatagatagaatccacagctctgatatgagacaagaaagcattacccaaaccttcaccagcagaagcacccttggttaaaccagcaatatcatagactgttaaatgagccggaacttcagaggcaggtttatagattttacatagttcatcgaatcttggagatggaacaatgactctagcttcttcaggatcaatggtagcgaatgggtagttagctgggttacctaatggacatctagtgatagcttggaagaaagtggatttaccaacattagctaaaccaacgataccggcctttaagttgttacctggacgacctaaaaggactttcttttcttcaacttgtttctttggaggcatgattaatcaatatttgtattgacagattcaatttacttatttgacactgggccaattgaaccaagaaaactactttttcttttatttgttttgttttagtcttcacccataaagattgatatttaagaatgatagagatacgacttgaactctaatcgattataaatgtcactaaaatagaaatggactagataataaacatcacaatagttaaagcaatggtaatagacacatatttgcgatgagtgtctctcttccttaattcgtgaaaaatttgaaaaaaagaaaaaaaaattttttttctgctgtcgaaggaaaacaaaataaaacaaaaaaaaattccacagacaaagaaaatagaaacatatgcggtgtgtgggtgtttaaatatacatatttttcgctctggaggtgtatgggtgtatcttaacttagccctaaagtaaaatatgtcagccctaatgtttttttacctttcttttcttttttttcttttgtttcatcttcaatttctgttgaaacctgaatattatagcagaaagttattgtgttgaataagaacttgtttaaacattatggtggtagtccaaaaggaaatctgagttgctaaataatctgtgatacaaaagtaatgtggaaatggaaagtggaaaagatagaactgagagaagactaaattcgtaaatttacttatttatctttataatattatcgaactttttctcgaagaagaaaactagaatagtttttggcattaataatatttaatcaataataatagaataaatttatgaaattaactccaatttacaaaagcagataaaaatacaatacttcgtatagatttacttattttgctttattaaatataataataataattgtaataaaagaaaggttctagcttgaatagaattttccagatgtttcggactattgcttggtatacagtggttgttggttatgcaattcagaccaaggggttttctataatccaatctgataagtttctatcgctggattcaatcagaagaggtggtcacttaaatgtatccaaaattactatggatcaaatgaaaagtgcaatgactttttacttgacatctacaaatttcgttgctttaatgttaattttaccaattgctgcatttctaaggaaagagcctggatcatctaatcttaatgaattcaattttcaacctttaaattcgaatggttcagaggaatacgaattacaagatttaccttctgaaaatggtaacgacaacggagatagatgtatcgaaggaagatcactttcaatggatttatcattagatatatcaaatttaatctcacacgaaggaactgctccatcaccatcatcgtcattatcatcgtcatcatctagtactcatttaaattcaaactctaattttactacatttttgccttcacatacaaccatatttcaaacattaagagacattgttggatgtattataccttctcactcttttggatatacagctgcatatatcacaaaactggttgtattgtcctctttattagttatacctgtatttacatatatgctagcgttatctttatctccagcatttgatgtagcattaattcaaaatacctcgatttttgaaattgtcactttattatacggtgtctgcggcatatctaagagaaaatatatttttaggaattttcttgttatgtgtgctgctttgttaggtatcttaataatctcatacactaaagcaacatgtgatatcttggctggaaaattatctattaatccaacaacaggtgaaatatctgatcctttcctatttgatagattaaaggcatctttactctgtggtttaggcaacttacctgttggtttatttgcagttatgtggaattcttggtttggtcaaagatcgaacactattcaacaacagagtgcacacttgtcccttattgggattatttctcttgcaatgttagtaccatttggtccaggttttaaagtgttttatgaatgtatccaattgtttaatggagatggtttattttggtcaacattgttaggttcagtatttttaggcactgttccttttttttgtgctttgttatatttaaacaggatttcatccccagaatatttgaccacatgtaacttaggttctataatttctatgggcataatggaatggttagctgagccaactcagactacaattgttagatgggaagtagtcggttatattatgctttctctaagttgtctgtttttgtcaatgattttggtctgaagacttgatatcactttcaataatatctgttccttttttgttttaaatcttatgaaatgattaatcgtcctttgcatcttttgaagaaacaaaaataaactacatattcataaattatagaatatatttatgctattaaaacatacacacatatatatatatatgtattcttatataatgtttaaatgtattatgacatttagattaaaaaatcgtttcaactttaaaaaagaaaagcaaagaaaatccttagagaattaattttaaaacacaaggctttttattttcttaaaaagtttatttttgttttgtccttgtctagatgtagtcttttgtttcctccaaatttttcttccttgatattatttgaaagtgtatatatatttttcaggtatggtagttataatttctggaagtttttgttatttatacatatatttcaatatagaaagaacctttatttatcgtcaaaatgtttaaagttaagtaaaagattgaaattatttaatggattaaaaaaaagtaaagtgttatgctttttaagaggttctaaactatttatttcggaaatcatttaatttatattctgttagaactttttttttttaaaaaatcatgtgaagttttaaataaaatttttatgtcttgaatttttcttataaaaaaaaatttaggtatttttgtaatattagactttacaaattgttttattaaatttaattcaaaattataacaagtaaatagaagagtaaagttttttcattgatctaaaactgaatacattaaatttagcggtgtttatttgactcacgaataatatttttttatattttctatttaaaataattgtttagtaaaaataattgatcttttttgtaaaccacttgtgttgtctactaatttgattgtttacttgaattatgcattattttctaactagaatttttttcaatgttataaatgctaaaactgtactgattatccagtgtcttaaaattcagtggtatataaaaaaataaaaaaaaaaactgataatcttcaacataaataaaatcatgttcttaaacaaatacttttattagtgtttttatattctaaaaacttggattttaaatttacagattcaaaaataataataccattaatatttaatgaaacatataaatttttattgtattcatacattgtgtaaaattaattacaacaatattcacttttttaaacaacaacttgttttatttatttgctttatatccttatattttatatttatagatagaccattttgtaaataagaatattttgaatttgtgatactttttagatttttcttccttgtgtcattatttgtttgcctgattcacaaagaataatccataataaatgagattgtattatattaacgacaccatttaaataaaattctagtatgcataaaccacgaatattcaggcagattatcagtttcatagaaacattacaattttttataacaaaagaataaatggtagccagtatctaaatgaaatttcaatttacttacctacttacttacttattattattactctattttacaaagttttttttaaaaaaaaatatagctaaaaacaaattatagacatgtaaacacaggtgcacacagagtgtgataggtgtacaaattatgatgaaaaacacttatcaaaccaaaaaaaaccatgtagtaatgaatatgttcatgtctgtaatattctgtttaactttatttattatatgagaataaaagaaataaggtgaaatagaaggatgattgtttgttgtcattaaaaaataataataataaaaaaaaacaaatcatttgtgtttttatttattcttcttatttctttaatccacttctcatgtatctaccaataacaatacaatggtctctttcataaggttctagagtcaattgttctaatggtttgatacgttcttcacgtaatttttggacttctctagcaaagactgtttcagcatctacagtagagtcgatacagttagctttaatagaaatgacaacaccacctttatcctttaggaacatgtgagagttcaaagcgataatacgagcttgatccggttgagcaacatcagcaaagacacagtcgaccatatctacaagcattctgtatttttgtgggtgtctagcatcttcgataattggaacaacgtttggtctcttcttagccatggagatcaattctctacctggtctatgagagaattcaacagcgtagacaacaccttctgggccaacgacatcagagacatgtgagacagaagtaccggaggcagcacctaaataaagaactttcttacctggggcaataaataattcatctaaaccacccatgataccagctgcaagcttagatctgaatgggttccaaacacggtattcgacttttgttggtggaacaccatcttctttggatggttcttccacagagattctcttttcaccgtagacagattcgcctggagccatgttcttggtaactaaaagatcttccttacctctagcaatgaagacaccggcatgtttgtgaggttcgatgacaactttggcaccacccttggcaccacttttagcaccaccacgaccacctctaccacctctggcaccgccacgaccacctctagcaccacctctggcaccgccacgaccacctctagcaccacctctggcaccaccacggccacctctggcaccacctctagcaccacctctggcaccaccacggccacctctagcaccacctctactacctggtctgaatgacatttttttaaactatggattatttatgtataaaatttatttgtactttttttttttaaatggcttatagtataattaaaaaacaacaacaaacaaatcaatgataaataataactgatcactaattatacttattattaatacttgttgtggtgtccacaggcaaatttaattatacggtgtatttaatttgataatactaaaaacaaaaactttaaaaaaaaagaaagccaaacggtaataccaataattggatatatgaatagttctaaactaataaaagctaactgaacgacaaattaaccaatagcaaacagaagagtaggaatatatgaaagaaggcaaatgtaaatggataaagcacttcctaaacactcaacatgaagattctgaatctcaagaccaatgtttaggaattgaccttaggagttaacaatctatgtataagaagtatattctaaatactttctatttcatttcttatcgatgatgaagatgaaatttttttttcttttatgaaaattttcgaaaaatacaaaggaaaaaaaaaaatttttgggcatctcttaacaaaaaaaaaaaaaaaaaaagaaaaagaataaaaagtttcctaaataggcaaccatgcttgaagtaattttacacgacaccaaaagagcaccagaacaatttgtcttatttagatctgtggagttagagtgtatataacattagaaacagacgccaagtatattatagtgtcctctgtttccctattgcatagaacagagaaaacccagaattcaatctatagggataatgatacaatagaacttctttccgttaaaggaagagtaaataaagaaaataaattaataataataataaaaaaaagaaaaacaataacaaaaagcatacaggccttagttgactgcgtttcttcttgctggctattcaatcaagcttcctggtcaaatacgtaaatataaacttaatataaatgaggaattcttcgatacccttgttgtcatcgtccattatagatgtctctagcactatggatgttactgcacaatcaccgttattttcttggaaaccctactctcaagaattgctttttttacttacttacttacttacttacttacttacttacttacttatttatttatttatttatttatttatttatttatttatttatttatttattttccttgtttattattattccatttggttttccgttcgattctggcactccgccctttttttatttcgattctccgtcccagaaaatcacgccaattgtttacaaagaacaggctgactactggtgacgacatttcggtaagcttttagtatgcaatagtatgtttgaatgtttgtacacctgtgcgtgtgtgtttacacgttatacaccatttgaatctgttatctgtgtaagtgatattcgtatacgcacatacataaagtacatttatataaggccactggaaacacactagtttcatttgttgtaaaaaaaaaaagaataacagatataacctgtattaaatttttatcaattaaggaatctttagaaaaagaaacaaagatacagagatacttatccaaaaattactaaatactagaataaacaatagaatatacttggggaaacaaaacaaacaaacagacaaacaatatctatgtctccaaaatcaaatacaactggtaacactgccactaccactaattcctccactaatcctactactactgcttcttcttcttcttcaaatggtaccgccactaccacagctacagggtttagccatagagaagtgtctagaaagaataaaagaagaataaatctagagaacaaagtgaataaaattagtgaaaacttcattaaaaataaagatcttcattataaagatagattaacaacgttacagactaatctgactagtttacatcaaggcacaaatctgttactcttaagcaaattgagagacttggaggagattagagatttggaattggtcagattaagactctatgaagaatacagagtaagcaggtcgagcattgagtttcaagaagatattgaaaaagcgaaatctgatcatgaaaaattggttaaactatgtaaagaaaaactatattttaaaattgaacagaagattagaaaattacaagaggaaagattgttaatggatgtggccaatttacactcatattcaatggattatagcaggccttttatatatcaaaagaatacgagaagccagactgtaagtggtgccaataataatatcaatgaaaataacggctatactaattacgaatgggaatcatcctcaaatgagtttgccactagaggtgacacagcaaatgatagtgcaactgatacagggaccgaaagaagatctttgcgtagaaggactgccaattcaagaaacggtaatgcgagtggcacggacgttgacgggggtgtctatggcaatagctattatttacttggggaagtgacagaagaatcagactttagaagtcgatactcatcaacaggtagtaaaagacatggtactactaataataattcaactcagaggggtaaacatggctcaggaaaccaatctgatattaattcggatgcagatttccttcaaggtatcagtgattatgaagatttacaaacgttactgtttggtgaaaagaccatagaaacaacaaccaattcgaataaaaaaagacacagaataaatccacgatattccactaaatctgcacctccattagaatcattaacaccggatgaagtcactagtgatattgcattgattagagaattaacaggtcaatcacctgctccatttaaactacgtaatccacctattgaataagctaatatatatatatatatataggacaccccctccctttttggaaaatcagcaagcaaatatagaaatgaaaactgcataactatctttcaatattattttttttatagaaacatcattctataagtagtgcttattttaacacgatttttgagcatatgcttccatcatttgatacttcctctctctatactgccatatggaaacaatttggagattggaaaaaaaccaaacaaaaaaaaacataaaaataaagaaaacaatgcaaaaattatagatggcacttaaacaataaactgacaattctagagaggtgtaatggctatatttaatacacaaaaaaaccaagcatcattcaatagaaagacatcctgataaacttaaatctgagggaatattagcaccatttattttatatgggtataaattctgttgaaattagaaaataacaaggtgtcgctctctatactatctggttatttcagtatttaattccgacagtataaatacttgaatatatttgaactaacatatttatagataggtagaagattatttattattctaataaaagaaagccaccatttgttttatttttgcatataaaaatttgtttttttgttttctctagatgggtttcaatctaaaaagatcaagtaagattcgattctcttttaaaaaatacataagaccaacagttggtatcaaatatttgctttatactctcacactgattcttatttttaaatggatccatagctataataaaaaagaagaagaagaagctagagcacctccgtattctgaacaatatttaagtacagatttacaacatccattttatgaaagttgtgtaaacacacaagaatatctgaaaaatgactcatataagaaaatgaacgctacctttgtaatgctgacaagaaatgaagaacttgatgatgtggcgcatacaataagtagtattgagtcccattttaatcaatggtttcaatacccttacgttttcttaaataatgtcccatttactgaggaattcaaaacaaaggttaaatcaatgacaaccactgaagttgaatttggtttaattaatgaaatagattggaatttcccatctggggtgaaacaatcgcttctattcaaggagtccttaatagatcaaagtgatcgtggaattatgtatggttctttggaatcatatcatcaaatgtgtagattttattccggtcttttttataagcatcctctagtaagaaaatatgaatggtattggaggcttgaacctgatgtagatttcttttgtgacattagctatgatcccttctatgaaatgtccttggcaggtaaaaaatatgggtttaccatattgattcctgagatctattggagtgtaccaaatcttttcagatacactcaaagttttatcaaagagaataaggggttaaagttgggatctatatggaaacttttcacttataatttaaatatcatgaagacggatgataaagagattcaagaatgggttcatctgcaaaaagatttagaacctaaattgagagaaaagattttaattgatctataccaagaggggaaattagataaaacaacctttgaagaaagtgtgttagatgtaattattaataaagcagaatctaagaagccattatttgaggataaattcaacaatcaagaatataatctttgtcatttttggtccaacttcgaaattgctaaaatatctgtttttgataatgacatttatgattcatattttaaatatttggaaaagaatgaaggtttttggcgtgaaagatggggagatgcacctgttcattctttagggttagctttaacattggattttgaggaggttcattatttcagagactttggatacagacattcaatattgagtcactgtccaaagaattcatacgaaaacgtatcaccatatcaagaaaatgatataaaatatcgtagaaagggaattagttcggtgtatgataaggcaacagataatggtatcggatgtagatgtaaatgtccttggaatactgctgatattgaagattttgcatttccatgtatggacatatggtttgaattagcacatgaagtacattttgagactaattttgatggcgaataccacccaagtatcgatgtcaatgaaattgaagctcagttaagagagaaaatcatagaagaattacaaatctaacttgtctcaactctgtgattcatattataaatatgctggttatagactgccacacataattagcacaatacctagttatagatgttatatgtattatttatagactttatttttttaacaaccttcttcctgtatatcaaattgtaaaataatgattgattttgttaaaagagctgaaagaggagatggaggggtttttagacgcctatatgggaatcccatggtaataagtttcgaaaggagtacaataaatgtcagtttgtacattgaattcgacagtttggattgttatttaaagtaacaaagtgtgatgtacctgcattccagaatatctactggctaagaaatatgtctctctttatcatagcctatatattgtaaatcgatgttacaaggaaagattgttgtgtttttttttttatttataagggatataaaagtgattatggaaggtaacttagcatttcaggcagaaattctgttgcacagtttacatatacaaatacaacacatacttcaagggaagaggaattgtcaagtattactggtataatagtaacatagttacactgcttgttgttattaattttagtaaagataagaaagaaaaacacaagaaaaatactataaataaaatacaatgtcaaataattctgattcagacgggtcgtctaagatagttgaaattagtccaccaagtcataacttaagcctacctaattataacggaagaccattaaattatatttatcaattatctgcaacaccatatccagcagttttacaaagtgggctactcctagcaacaccatatctatccccacaggtgccgttccagttactagcttctaataaaacgtcagcagaaaaagcaaggactattgaaacaaccagttggttttctcctagtttacaaaagggtttgggttcttttgcaagaactaaagggatagagaaggtgggaatttcgagtagaagtgcattgttatttggtattgcaagtttggctggatcatggatgatttttgataatgatttagagagtggttgtggatttaccgctgcttggtcctctctttacttaatgataaatggcaaatcatctttgaattggatcaagtttggtaaggtttggccaatgcttattagtggtttagctttaggaaatacagccatgtatggtagaagatatttgaccggtggtttcgactaatcgtgtgattcgcacacacacacacacacacatatatatatatatatatgtatataagtatttatgtatttctttactaaatattcttatatgtttcttttgtgcatttatcgattgctttatctttcttgtctataaaaggatgctctttatctaagttttttttttttagcttatctgcaattcaaaagagatatggtcccaatctttaaggaataccaatggaatataatagaaggggctggtgtactacattttgaattctgttgactataaccatatacatgtaagatcacaatacatttttttaccgagagccccaattgaactatatagtagatcatcttatttatttattaaatcaaatcgacaacttttactgaaaattactagtctattatttgattattcatacgttgttgctgttcttaactgttttttattaattttttttatatccttttacgttgtcttacgtggctacataaattagattcatctgtttaaaacgttgttatcataataaataattataattatagttgatgttaaaacagttaccaaataaaatttaaaacatatcccaataaaaatatcagatttattcaaacaaaacaacataatactagagttatatttacaaaaataataatataatatatttatttaatatgcactatacggctacgctatcatcttcaattattaatttaacaaaaactattataggttcaggactgttgactattccttatgcattcaggaatgatggaatattcataggagtatgcctaaccgttttagctgctataactactgggtttggattctttgttttagctaaatgttctaaaattttagttgatccaagaaattcatcatttttcaccatttgtatgttaacttatccatctctgtctcctttgtttgattttgcaatgattgttcaatgttttggtgttggtttaagttatttagttcttatgggtgacattttccctagtctatttggtgggaatcgtgaattatggattattgcaacttcattaattatagtgccattatgttcttttaaaaaactggaacatttgaaatattccagcatcttaggattatttgctcttgtatatttgtcattattagttatttcgatgtttattaaagatattctcattcaagattgtaacacttatcccactgtaagaggagacatatattggtttagaatttatgatattaagggattgctatcaacttttagtattattatatttgcttataccggttctatgaatcttttcaccattattaatgagttgaaagacaattcgatgacaaatattgttaagattatcagtggatctatcatcatatcatctatcggatttttatctgtagctgttacaggttatctcacttttggaagtaacactatgggaaatattatgctaaattatgactccaattccatatttgttatttttgggaacttcgctttagctttaatgttattattatcctttcccctactatttcatccattaaggatagcttgtaataatttgattgtttgggttgaaattaattatcaaaataatgcatcatcttctgaatattatggaaacttaaatataaataattctagtgctaatagatcgaacacattaaatagccagcctataacattaacagtaaatgaagaagatttggtagatgagaataccacatttctacctcctcctgcttcttcgtctgtttcatcaagttacttagaacagacaaatgagttagccccaggtaatcaagagcctacgccactacctggtgataatgaacaacatactccgttcccagattcaagattttgttggataactatcctactattgtcatccatgtatattttggcattaagaattacttcatttgcactagttttagcattagtaggtgctactggttccacatcaatatcatttacattacctggattatttggttataaactcattggatctgactcattggctgttggacaaatgatttcaaagagagatcagttctataaaagagctagtcttctattagccatatttggtatctgtgttatgatcctatctttatatgtgacaatattctttggtactgaaagttaaaaattcatatgtatcttttagcttatttgctcattatttcatataataatttcaagtacatacttatacattatatatttgaattttactttgtgattatgattattattgttgtttatttatcttgaatatataagttacaattctatagaataatttttctcatttggataataaagttttggtggaaaaaaaaaaagaaaagaacaactactgatataaatgaatggaactctataatgataataatattacaacaattccttaaagtcatgaaattggaagttaatgagattaatgcaatgaatatctatatatgtatataattatatttttaatttatggaaatgaaagaaagcaaaacagaacaaagaggtttgaatttatcaacaggttactctttagtttgtttcggtctattcatgtgactttttctttctttcttttaattcaaatcggtatttgatgtattaccatcacctaatagttcactaccataaattaaaatagtccaaaaaatattacaccaattccaaaaactccaagaatcgacaattatactatcatcatttataataccgttttgttgaaaccagttacaattccatagacataaatcatttttcaattcaccagagtattgtaatatgagatgtgcgtagatagcaatcaaaatacaagggctataccaataaattaatttcatgactttacgacttcttttcatttgcttaatgtcataagattttctttgtaaagatggtataatccttgtagcagaataaaaaattaacactctgaaacaaagattaataacaatggcaggtgatattgattcgaatgctaacttccaaatgattaaaaatagttcacttattgatcttggtacacttaatgtaaaattttggaaaattttccaaataggttttaagaattgataaatattgttcattgacaaagtttttaatacaaaatgatcgattggagaggaaaagaatgttgaagaagaagaagaagaggaagaggaagaggattgtgcaatttttattaaaatatcattccaaatattagtaatattattcaaaatagtgttgtaataataaaaaatcattgtattattaatggataaattcttttgatgattttgccaaacttctaagaacaactctaaaatctcatcagttgcagtagtggccaattttggtgatatctcatagatacaacgtacaatataagccaaaaatagagaactttcaatgacagaacctgcctgagaaacaataccataaaggcttagaccaccgaccaaagataatacgaaccctaacagcgatgcagtttggatagacaattcccagattggagtcacatatatcctataaaggtaatataatgatatggtgacaattccactggaaaacaataaagaactgatgatccaagaatttgaatttttttcgtagaatagccatttatttgtttcaccaattgcctgaatagctaagattgtgaagaatccctcagacagactgaaaaatggagttgaattagataaaagaaatttccatggtgtcaccacatatttgtaataaaaataataaaggatccaattgttttctaaagtgatatcatgaggagtattagtaggcaaagtgctatgtaatattttggttagaatgtccaattgtaaggaagaatcattttctatcaattgatgcagttcgatgttagaaaacccagataaaaaaagatgtaatagagatgcaataatcgaatgttgaaaataatataggatattagctaatatgataaagatttttctgccatttctcttagccaatatacttagtgtagtagatataaaatataatagaaacaaagttactgtaaaagataatccacaatagagacctccaatcttgaatgagattggaattgatgtcagtataagacccaaatataaagttccactcaagattcgtaatccacgtttcaaacttgataaaaaggatgtcatatttgtaaatagaaaaaaaaagttaaaggtattttataaatgttatttgaccagtagtgtaatggtagtaaaagcttgtgtatgcatatatatgtatatatatatatatatgtgtgtgtgtgtacgcgcacagctctaatcaatacctatttttatatttaattgaaatgaatattcagagatatttaaaatttgtattaccacttattattagtatgcaaatgaattctaatatcttcgatatgtatatctttccccacaaaaataaccaaatgattaaataaattaacagaaaaaaaaaggcaaatttcaaaattattagttagaatatgtggatttatttatttattaatgatttgttcctgctagtaacaatctgatctttcatttacctataaacttatctatatcatttgatagctatagacccacaagtatataaatatatatgaatctttccaattcatttattgtttttcttgacatttttttattattttttttggaagctacaaacctcttaggtgtatgggtgttagtatgtttggttttaatttttttgctcgaaccacaaaaaagagaaaacaataaacgtgcctatatccgggtaacctgttagtttttcttttttcttttttgatttttttttgattttttttttttttttgcaggttttgccattttgaaattttcgatgagctgtttaggaagagccattttgaagaactacggtgattgcgactaatgagatggggatacgtgaagcaggatagatacgataatataggtatttgtgtgctgtattcgtagtttatattgtttggttgttattaaggggacatagttccacgtagattaatttagttgaccttatttctctttcctttttttttccagagttgaaaagaagcttgttggctagacaaatagagagttagataaagatgtcttctgacaagatcgagaatgacccctcatttaacaatggtaaaaaaagaggtagaaaagaattaagagtcataaaaagaacctctacaagaagtagtgatttaattcgaaaggggaaaaagtcatatgaatcacacgaagattctaacaaatattttgatggaaacgaagtaaatgaagaagaagaggaagaggatcaagaagaaggaagtgatgacgacgatgatgatgaaagaaaggaaaaggtttatggcgctcttttaacaattctaaaatctgaacatcctgaacctaaaagacgcaagaaaagttcaaataatttaaataataacctatcacaaactgaacaagatccaaaaaaatatatagctcaagatgattatgaaattactaatacagatgttgtattagaatttgaaaatgaacaaattgaaaatgctttggatgaaaaacaagccagtgaaaaagaagacaaggacgaagaagaagaaactataagtgataacaattcattggatagtgaggatgaaacagatccctttgaaagtcattttaataaagcttctgaacaattcattgataaattagacaatgcattcaaatcgcatgaaattaaatataaatcactgaagttgagtggtaattcgatagatcaatatatgttatattctgaaccaaggatccttacagatcaaaattccagatcagcacaaattaaaactcccatcattaaatcatctattcactcctatttcctaaaacaaagattaaaagtgcaaaatgatttaatggatcctaagaaagatgacttgacaaaacttcagaaggatttggtagatccaatgtttcaatataaagatatattatacgaatatggcaactatgatactgatgaagaacaatacagaaatttatattcaatacatgttttaaaccacatatacaagacaagagatagaatcttaaagaacaatcagaagttacaggataatccagatgcagaatttcttgaccaaggtttcaccagaccaaaagtactgattatagcgccaactagagatacggcatatcatattgttgacattattattaataaatccggtatagatcaggtggataagaaatctaagtttaaagaccaatttctcgaggaatcactacccccatcctcaaaacctaaatcttttcaacatatttttaaaggtaataccaacgattttttcatcctcggtattaagtttactagaaaagcgattaaattgtatagtaatttttatcaatctgatataatcgtttgttctccattagggttacaaatgattgtggaaaacacagataagaaaaaaagacaaaacgatttcctgtcatctattgaactgactatcattgatcaattgtattctattgagtttcaaaatatttcccatttgttcacgatcttcgatcatttaaacaggatcccacaagagcagcatgatacagatttcagcagaattagaatgtggtacattaatgaccaagctaggttgtttagacaaacaatgattttcactaaatacatttcccctgttgcaaattcatttatcaatggtaagtgccaaaattggtcaggtagatggaagaatcatagagtcattcaacctgaacaatctggtatcggtcaattagggttaagagttagacagatatttcaaaggtttgatatattagatggtaatgttgtggatgaaccagattacagatttaaaaacttcaccagtgtagtgattccaagtattattaaatcaacaggttatgaggaagggattttaatttatattacagattacagtgattatgttagaatcaggaactacatgaaagataagactaacatactatttggtgatatcaacgaatattcagatcaaaggcaattgacagcaaataggacattatttcaacaaggcagaattaaagtattgttatacacagaaagattgcatcattttagacgttatgaaattaaaggtgtcaagagtgttattttttacaaaccaccaagtaatccagagttttataatgaaattgtcagatatatcgggaagagtgtctttttggatcaagcggacataaacatctctacagtgaaatgtatctactctaaaatggatgctctcgccttagaaaatatagtggggactaaaagagcaggtattttgtgtcatgctcaaaacgagacttatgaattcaaataaggaagggaaccaagatatatacatgcatattcatcatttataagaactgaatgatatatcaatgtgtcaatatacttatatctaaattttttttgctttttgtttttgtataatcaaatcgatgttgttccaaagaaactttcctttttaggagtgtttttcctataatagaaaatcagtcagaagttaccttttttagtttttagttattttttgttttttctcttccttttttttttttttttttgttttgtatccttatatgccttaaattttgctttaaataataaaatagaaaaaaaaaagagagaggtttatttgagttcgtacgttggaaaagaataaaattctatgtttgtgttcacaaaatgtggactaggaaggtctacgatgtgaagttatattaataaccctccaatagttaatctattttcagattgaaacacaaagacgaaggacttaattgtatgacagtgtgtgaatagatacataaaatatataagaaatacgacttagaaaagaaaaaaaaaataacaaaaaagcaaatgaagattcaaacaaacgcagtgaacgtgctagaaagaacttcaaactatctaaattcaggggtgctgaagataccacctacatggtttaatgtgattgcaaaatatccaccaagaaaacagtttattagagaacctatattaaatgacccagtaacagggaaatcaagggtcaattcattgaaatttaaagatggtattaataaaaaaggattgtataagacaagggcaaatttgaaggataagacatctggtacaaataaattatataaaccggtcaatcttgtatatttggaggatcagttacgacaattgttttatgaacaacatccgtgggaaagatcacgtccaaagattcttattgaaaacactaatatgtctgcaaggaattatgattggagtcaaatacagcaattgggcaaacctttggatggagaaagtgttgttcaaaggtccttatatctattaaagaataaacagtgctctagtttgatgggtgcatatgatcaggcaagatttgagttttatagaattcgaatggaacaagaaattcaagaacaagtagccatggaagaagcagaaatgtttgggtctatcatgggtctatcagccattgacttcggtattgaaaaggaacaagaagttattaggcaatggaaaaaaaaagttatcaaagagacagaattgttatctgctagacgtgccaatccatcagaatcatggtctaaggaaggtaccgtttcaaaggaaaaaaagaacatagaaaaagttaatgaaaaagacgaaatcgaagaattattattatgatttaatactggaagtcttttttgtactttttattaaattttcttattcattatatatgtgcatatatttactatgtatatattcactgcttgtatatagaaattatcacattgacacatttggaaatattagaaatcttagaaatattgtcatttctattaatcatattgcaatctactaagatttattttatacgccacacaagattggataaaaggattaatagtcatcgaatggcatatcataggtataagccttttacgcaaactattgaagcgagagatcaattatatttgcagctaacaaataagaagaaaaaactgggttagaacagaaaaatctcatgaaatcaagtgacttacagaccatatttcttatatagtgtatatgtgtatgcatgttatgcattatgtacaatagatacgacattgcagttactggttgacaataaattcgtctttatttctttgcaaaaatggctctaaaaggtttttttttgacagaaatatcaaaaaccttttaacactaccctaactatatataaccatcctagaggaaaaataacaaagtcttaaatacaaccctattaagtatttgtgacagcgaaaaaaagattgaggaaaaaagtataaaaacgaaaaaaaaaatacttccaatacaaaaattgatagatgagaaaatgttcctataccatttttctatacttttaccctttcaggatattgtgggtgaattaaaaaaaaaaataacatgggaaaaaaaattaaaaaagaaaaagaaaacgaaaaaattcctccggaaaaaaaaagtaataacaagaaaaaaaaaataaggaaatgacagaatgatggatgattcatttatattcaactttggagatatttatcttcatgactatataaacaacctatgggtatttgcatcaaagatatctcaataaactagcattcgtgttccttgaaaaaattatcatcaaaaaaaaaagctcgggtgagttttcttaataaggagcccaagttaattacaagtatccacatatatatacatatacatatacatatacatatagatagcaattatgtttagatctgcctcttatagactagtatcctgccgtggtttggccacaaatgctaccaagaatttgacaattggtttaattccaggtgatggtattggtaaagaagtcattccagcaggtagacaagttttagaaaatttgaacccaaaacatggtttatcatttaattttattgacttacaagctggtttccaaactttccttgatactggtaaagccttgccagatgaaactgttaaagttttaaaggaacaatgtcaaggtgccctttttggtgccgttcaatctccaactaccaaagtagaaggttactcttcacctattgttgctttaagaaaggctttgagcttatacgcaaatgtgcgtcctgttaaatctgtctccggtacaaatgataggccagtcgatatgattattatcagagaaaacaccgaagacttatatattaagattgaaaaaacctataaagatcctgccaccggtactagagtcgcagaagctactaaaagaattacagaagttgctacaagaagaattgctactattgccctcgatatcgctttacaaagattaaagaataatgggcaagctacattaactgtcactcacaaatctaacgtcttgtctcaaagtgatggtttattcagggaaatctgcaaagacgtttatgaatctaataaaaataaatacggcggtatcacctacaatgaacaaatcgtggattctatggtctacagaatgtttagggaaccagaatgttttgatgtcgttgtagctccaaacttatatggtgatattttatctgatggtgctgctgctcttgtgggttccttaggtgttgttccaagtgctaacgttggtccagaaattgttattggtgaaccatgtcatggctctgctccagatattgctggtaagggtattgctaacccaatcgctactattagatccaccgctttgatgttagaattcttaggatttaacgctgctgcccaagatattcaccaagctgttgatgctaacattagagagggtagagttaagactgctgatttaggtggtgatgctactacccaacaagtcactgatgatatccttgctagattgtaatgaaattgctacatgtagtttagtactctatctatacatatatgtgtatgtaccaaccaaaaaaaaattatatatatagaaattttttaagatataatgaaattgttaatgcatagaaaatatgttatatatagaaaaaaattattgaattagaacttcttattacggattagttcattgtactatgcttgggtatttccatttaaaatcttgttccagtttatctaaactgttgcactctaaatctgaatttttagttttcgaaattctttcactgtctggtatagtattattttcctttgaggatgtattttgattcatgtaagggtaaagaattggtttctttgatgtttgtgaacgcaagaatataggttttttggggataggaggtggtaatttgattccttcagattttacgatttgatctgtagattcaattagtggcttcaaaacaacactgctttgtctttttgaagaagtatcggtcgtgttatagcttaatgaaacctttggtttatttttaacaaactctagattttttgatggtgattgtttagtaagcttgttgacagtcaatagaggttgattaatctgtgaattaacgttagtgtatttcccataacccgatgctgttctttttgctggagaattttgagcggcttttaatagtgtcatgactctcttttcgatagaattttttgtgtctgcattgatagtaaatttaatgggggatggagatttgaacgctcctggtttctctggtataccaagcaaattttcatcaatgtaatcattgataatataattgttttgaggactattagtattggtatctaacatatcacgtccgttttcttcaatattcaccttcggaagttggacacttttatatgttgatcttttatctaactttctattgttgttataatgattgtcttgatctagaaatgaatcagaggagatgtttcttttaccaacagacgatgtagatgatgaagcggaagggtttctaagatgttccattgagaaggctcttacattgctggagatgccagatacgctatttcttaatgcttctattgtggatttaatactattacctgtattatttctcgatgatgttctaactaaagatgtagtagtattaataccagactcatttgacattactcttttcagttgttcagttaatttttttactatgctacctcctgtgtcattaccagtaacattagtttgcttcaaggataaagatgatctattatgactaattgaacttcttcttgatgaaacaggagagtctatacattcttcattatttgtctgtgtctgtgaattcacatatttgttatttctcttattagagttaactggttggagaggattgctaacaaggttaactatagttttgcctacattactgtgaatattatcatggatatatggctccttatattgattaaaggatgaaacagtcttttgctttgaagatgaaaaatcctgaagggatggttggactatttgatgatttaattgagactcaaaagttgtcatagatttggatggatgcattgctaggaaatcttgtttgattggattaggaattatattattagattgtccaagtgttacagtttgactgtattgtaacatcggtatgtattccttcgttggtgatctctgtggttttaatggcgaaataattttttgttgttgttttattggagtaactggattccttgtaggtgaataatttgtgacaggtattgggaaatttaatgtttgagaagataccaattcactttctttgaccctctccagataaaagtttttgattgggcatggaacaccttgcattctagacacttcttccaaaacttgacatatattgggtctttgtaaaggtgatggagatagaagtactcttattaaatttttcattctatcactgtaaattggatatgcaggatattggtatcttacagagagaatagcagattcgccagcatgttcaaagggtgttgtataataacatagtttatataagaacaccccaagtgcccatatatctgccttttcatcaatagcgaaaccacgagtcaaatcaagcatctcaggggctctatattgtgcggttgtatttttcataatatcatgttgaacatacattaattcttgtgaatttctaggaggacgaattatcccacaaaccgagccaaaatcacatatcttgaaaacattatccttagagatcaacacattttcgattttaatgtctctatggatcaaaggtggttgtaatttatgcattgcagctactccttgacaagtttggctcataatatttagtacttcaatttcagtgagtctattacgtaatcttgtgtttagaaaattcaatagtccaccatttttacagtattccattaacatgatcacttcatatgaaccattctcgattgaaaatttttttgcatgagaatcaatataggagacaacatgtttattatgtctaagtaacttcatggcatcaacctccgctcttaatacgttcaacccaagtttatcaggaacgatgaccctttttaaacatacaatatttgatcctgtgtattcatctttaggcgatatttctgctacatagatttgggcaaacccaccacttgttaaatatttgataatttttgccttgtgtgaacctacagttaatatttgaccttctcgatattgattaatttggggttgattcataagtaattaaagaatataattagagtatatagagtggaaaaatgaatagagtcgataacacagagtggaaatgagtggtagaagctaggatgtttgttaaaaaaataaaaaaaagataggacaggtatatatgttttttatcaaaataatcaccattcgttattttataatcaacatcaaaaattgattgattgattgaaaggctgaagaataagataaaagtatacctagttatggaactatttatagtgtaaagcttcaaatcattgtcttgactgtagatcaatatacattgatttacccattttattatttttttttttttttttttttttgatgtttgtcgaaattgtttaattttttttgatctaaaagtctcgacagaattaaattttcgaaaacaagaaaaagaaagccacaaatattgcagccagtttcattgtgaagtgactgaacattcgccaccgagccccgatacgttattataagacaaataataaggtcttactaatatacatttctatggatatgatagaattttttttttttcagattactttttgggactaagaagatgtatctgtcttaactttattttgttttaacaactatattttttaagaagtgtatttatagtaccatagtaatgataattattatgtatatggacgacttcaattaatatgcacagtatataattacttaacaattttatttactatactatggcttatacttaataacaagtttcatcctaacttgttattacatcttagttttttttctccttccttacctttatatattgtttatagttgtaaaggttttcctttgtacttttccttcttcatgttctttaaaattctttttgttttgaattctcactttagacagttatacaaatattacttcaaaagaggctggcatattatattattttttgttattctaatgtccgtagtgagttgcacaattgatactcttattgcacgattatacctctaacattaatcaatagttatattataataaggtattttaattcataatatagatagaacctctcaaattcattatactacaccttgaaatgataccattttgtgtattagaaaatttttctataaggtaaaaactagggaaatttttattgtttttgagtcttggtcttactgtatttagtttttgtgtaagaaagttttatttgccgttttttctatttcttctaggactgaataagttcaatatcattatagtatactaagaaaaaaattttatattttatgttggagattattcaagatttggcaggtttgcaaatttgtaatatttaaatataatttaaatttgtttaaagttacagtctcctgatctgctatttcctatttataacctctttttatatttatttttattattcatttcaactatttgatagtataattatgcgggttattttttaaacttttaacctacaataataaatgttatcaaacaaagttgaggagaccattgggatataatctaataatttatcaacaaattctgttttatcttataacattatatcaatttaatattctattggacctctaaatgagtgaggttgttggttccttggcccagttggttaaggcaccgtgctaataacgcggggatcagcggttcgatcccgctaggaaccattttttgttaacatgattcacatagttttatcatgaaaaacgacactattgactgtaatatttcaaaagaaaaaaatatttacatatagtgttgtggtacataggttgcatagttaaccatacactatagatataaaatatattattattaatactgttgctaaactaactgttattagaaagtcacaactatagggttatcatataaatttgtaaaatcaataatgatcttgttgccttacatatttatcaactgtatatctaattttaataaagtagatatatttgaaagttcaaaaataaaatagataaagtctagttacatacagaattacaaatatataaaatcaataattagactaaaccctcaatatacagatatatatatatatcattgtatcttttatcttttttttgttaatccatagcattgttttgcccttcttacaatacccctctcaaagtactactagacctcttatgtttataggtcacaggtaagctcttcttgggtagtatgatattgctaacaaaataacaaacaaattacgaaaattcattaagttcatactttgtactgtatgttgtcgcctataaagtgattctggatagaccattatccgtagtatttcttaatcatgctgtcattcccaactgtatcaatctattaagaatattcatacgtaacaagtatttaattattcatacataactcaaaactaccagccaatattatgaaagaagatttaggtaatatatgtgtgaaccaatttgctttcttgaaatcaaaatctggtttcatcctgtttataactttgaattttcacatattttcaaattacaagaaatctttgtgtgtgacatcattagataagataatattggaaaataatatctaatggtattgataattatttaccatttttatcattttagttagaattcttctacatatgtttgtataatttcccttttttaacatatgaacacaaaaggtatttggtaattataaatagtctgtcgagattttttacttacttcttgtctatagtaagaaataaaaccaaataactatatcactgtttagttttgaattgtttactaaactattaaacacatttacattatttacatatatatatagcaatttactagtacttcaaatttttttgttttcgattttaaaagtttctggaaatggttatttaacaagattttgggaaaaagctaaaaagcgatgaccttgatagagatagatatatacatatatctataattatgaacagaatgtattaaagtaatatacactttatgaaaataagagttatataatatttgtatatcgacttacaaaacagatacttgtttttttttttttcacccattttttgtaagtggataaaagctgtacaacattgacaaagtttttcttcttataacagatatacatacacttaagagatatacgattttttaaatatctaaatggccagaaaattaaaaggaaaatccaaaccaaaagggttaaaaattgctttacagaatcaattataccaacaaaaattagctaattctcataaaaaaaaacaacaaaacattttaaatgctaaatcacaactgtctaaaaaggctttagaacaaagggtacgtcagcaagctaaagaagccaattttataccgtttaataaaaatgaaactttattattaataggagaaggtgatttttcatttgctaaatctattttaatacaaggttatattcaaccagaaaatttaattgtgacaagttttgatgcttctgttaatgagcttaaattgaaatatccacacagttttgaagataattatcaatacttagttgatttaggtgtgaagattttttttcagatagatggaactaatttaatcaaaacttttaaattatcgaaacatacaccatggaagaaaataatgggtaaacaatggcattttaaatatttacaaaacattatgtttaacttccctcatacaggcaaaggtattaaagatcaagacagaaacattgcagaccatcaagaactagtctttggatattttgatagtgcaaagcaattattcaaattggtcaattcacatgtcaatcgttccaagtccaatccaacccaagggtatcaactaaataaggaaacagacactcataattcagcttctattagtgaagacggcattggtaatataattatatccacatttaatggtgagccttatgattcatggcaggtcaaattattagcaaaaaagaatggattagttttaaacagatcatgtaaattctattgggcaaattatccagattatcatcataaaagaaccaatagtgaacagagcactacgaaacgtgcagaagaaagagatgccaggacatacatttttaagcaaagcatcagaaagaaaaacaagtctaatgatgattctgacgcagacagtgtgtgattccaacagcctagtaatggcttcttttgtctattttataatcaaagaatatatatacatatataagaatatataaatatagagatgtatataatgggttgagtaccaatagatgctgtattaagttggatacattttaatgaaatctgcctccatatatatttgtttatcaataggatcgaagatttccttatcttgtaggtgcattatatttcttgcccttagttgtttagctaataattttattctttctgcatcgtaaacattaccattgggtaacattactggattttcaaacagtttggattcggtgtgatgggcgtaaggtagatgttccgcaatatgtttgaaagggctattacaaattggacatggattataatttttttcattatcaactatattttcataatatgcggcagatttatctttattttcaataccaccattatctctactgtcatttccattagtcttattatctaactcgttaatatcaatgctaccatacctgttatgcaagatattattatattgttcaagtatagaagtattcttgtcatgaaaacatgcttttgttttcaaaacagaagtacctagagatagatatattaaaagcggttcatttctagatatcccatacattgaataatattcatctaagaacaattcatttaatttaacccaattgttgtcacccaacagatctaagtattgtattaagttttctcttttaaaaaatttatccttttggctgttaagtgagtagtttgtttttgaagagaatttattattatcattattgttgttgtcattgttgttgttactatccgaatctgatgctaatgagaagtaatttttatttttaaagaaatgattgaatgccaacgatggatcttgttcatatgtggacaatcgttccataaaaggtgttgattcatagttatttaatttattctctctttgcatagtgactagcagattctgacatgtttccatatagatcattaagccagatgcaatctgcaaatcattaaaatttgtatccaaaaacttaattaaatggttttggtaacagtttattgcattgtcataatcatgcttcttcagtaattcaatatattgttgaaatctagtcagaaattccaaattagattttttatctcttaaatacgcttcattctctttgacaaactcgattaaataagttagattatgattctttaataacgatcttgagattttgtttgcattaagtagtattttatagtctaaaagactatctatatcttgttgttttagaaagataacaccggggttttctaaagtattttcatctaggtcaccgtttcttgtcaaataatcgccaatcagtaaatttgtatatttttggtaccattgaacaagtcccaatttatcctttgaatctttatacctttgcaagtcttggaaaaacttgattctttgctcaattctgtttaggatctctaattcgttattaacaatcgatttgatggatttctcgaagtgttcagttatctttatacagtcgtttaattctttcaatgccaacttatcgttccccaaatccttacaagacaataaattatcgattttggcactcatagcatggatcttagctgaataagtggtcaatttattttgaaatcgatcataatttttttgtagaagagaatatgggatatgaaacaactgttcattcaatttcaaatggaaatctgttctaggttcgttgaataatgtagttgttgaaggtaatgacatcttttttgtttatatatatatatatttcttatcttatcttatcttatctcatttatataagtgtgctttttatacacttatatttctattgggaggggtgggaacgacaaggataaaaacatttgaatagtaagtaataattgtgaaagatagagagggcgagaaagagggaaactattgtagaaataacacacagagtctgtgtagattataccacgttggaatagtctaagatatccaatgcagtttagtgaattggagtcttcatctgcatatagcatttgcaatagtgaaatctggtggtttctatctccttctttttcttttgtttttttgttgctgttgttgttgtatcaacccttcaacagccgaccagattagattttcaggaaattaaacgaagatgagggaaaaaagggcttggaaactacagaggagattagggttgggtgtgtcgcaagcttcagccctctttattcgtttcttatttagcagggcttccctcttcttttattctgttgagtatgtgtccaataaatgttgatgactagtgatgtaacattatacaaggcattcattattatgcatatatatatttatgtatttatgtatttatgtattcgttagttatgataggcgaatatagtacaaataaggaaacagaaaataataattataataaattcacaaaatccattccagatatatcttaagtttggatactttacaatggggtgttggctagtttgttaataattgcatcggtgaattcagtggtggtggacttaccgcctatatccttagtagtatgcttaccttcagcaatgacttgtttaacggcattagagattctgtttgcagattcctttagacctaaatgttctagcatcaaagtggctgagagaatcatacctgttggattggcaatgttttgacccttgatatctagaccgacgtgcctggaacctggttcgaagaccgcatattctctactgaagttggcaccagcaaccaaacctgggccaccgatcagagcggcacctatattacccaaaatggtaccgtacatagatggagtgaccatgacatcgaattgatgtggtttagccactgcctgcatagaggcgttgtcgacgatgatcgaagaggtcttgatatctggatactccttagcaccaatctcggtgacggtgtttctaaacaaaccatcacccagtttcataatgttggctttgtgaacagcgcagacggagtgcctgccgttcttttgtgcaaagtcgaacgcaaacctggcgattcttgcagacttttccttggtactgattttcaaggattctacaacaccttccacggactcatgttcaaggccggagtattcaccttctgtgttttctctaatgacgacgaggtccacgtctgggatctttgttttgactccctccatggacttgaagatggccacattggcatatatgtccagttgctttctaagggcgacattcaaggagccgtgaccaacctggtcggcaggtgtgtgccatatacctttcaatccgatcttgtttctcttcagggactcaacagccaacttaacgttttctttgttgtctaaaccagagatttcaacagtttcccagtcaatggggatgttttcagctttaaagatggagatcacagagtctgtgatttctttaccgacaccatcaccaggtagtaaagtgactgtgtatctaccaccatatttctttggcagtatggtttcttgtaaagaggtaacgaaggttcttttggtaattaatcttcttaacattgtttttttttttgtgcttcaatttatggtaaaatcaataaaaacaaaacaaaacaaaacaaaagaggggaagtagtgtctcaatgtatattatatttatatttatatttatatttatttatttatttattttgaatgctcctatctgtatatacacgtagagtgatgcagaaactggggtaggagaagagagagagagagacgagggaaggtaggaaagccaaagtacaaaaagtttatatttgcgtatatgttcaaagaaatatatccttaaaagaaaagaatataaagaagagggaaataaaaaagaaaaagaaaaatgggaaagaacggaattgattagttatatagaacaggagggtttctatattttaatttttttcttgttgtctctttcttttgtggtcttttatttggatctactgaacaagagatgacacatagagcaaactgaaggatagatagaccatagaaagaaagaaaatgtgctttaaagagaaaagaaaagaaaagaagagaagagagaaaaacaaggtctaatcagatggatggtggtagtaagaaatgcccaaacagttattattgattggatctcgaagcttacttttgcaggaagagtgtgcaatacacgaatgcatgtgtttccctcgagaaaaagagaaagagacaaaggaatgggatgcaccaactgcttcttattcttcttgtcttccaatgaaactacaaaatgccatcgagtattgttcaccttatgacactctgtatggcaaaggattattattaccatcattacgattatgataatcatggttattattgacaaaaaaaaagagaaagaaaaaaagaaagaaggaaaatactttttgagccaatagtaatggataagacgcaacagaagaaatgaataaatgaatccgtgacaaaacgctctgattaaaacaaagaaagaaagaaagaagtaaaatcagaaatcagatttcaaaggcatttcacccctttttcttcaaaaaaaaaaaaaaaaaaaaaaaaaggtcattatgttctccgaaatcacggcaatttgactgctgtgactgaaataacaaaaaagaaaacgaaaaaaaaaaaataaaaaacaacaaataacaaacaaatttgactcctttctcttctcgcccttccctgtcccccgagatatcggaagtcacgtgaatgtccatgtgtaattttgaaacaagctcaaaaaaaaacaatattggaaagaaaaaaaatctgtgtcagagtctcttgtaattcaaaagcagatagtgtaaaaggatggaagtgaaagtgtcgaggcaaaacgcttggcagaaactttgtttcaacatttttcactttctcttttatacctggattataaaattgtttttttttctttttgtctttagagctaaagggagaaaagaaaaacacacacataacaacaaaacaagtaaataataattgtagttattatagtcatgatgagctcaacagtaattcaagaatatagatatatccttagacttttactattgaacaaaagactatcattatcagaattgcgaaacgttagaaaatactatatagctacgaaaaaatatcaaaatccagtaatatgtaacaatatgctacatagtgtcagaatattcctttctaacgagacagaatatagacggttaatggatctatataatccactgaatcaattaactaaacgcgaacgaatttctaagacagctaaccatgtcggtttgaaagttcctgaataaagacttgatagcagcagcaacaataataataacagtaacagtaataataatagtaataataataaatctgtatcgattcgtataagagagataataccatatctccaccaaaaatactcaaatgagacatcgttttctttgtattatgtaataaacatatatattctatatatgtttatatatatatatattattattggctacctttttttttttattttctaacccgcttgtttctcctccaccttttttttgtaaatttaatactcttttcttttttttttcctttttttttctttttttcgaacatcgacaataactacggcgtagtgacgtattgattacccccgctaaataatcatcttattgtgtattatttgcccttgactattgttttacgttagtcttttccacggaaacaatattcttttttgtatgaggaaatactggaaatctgtgaaaaaatgaatgaaacaatagcgttcttatcatcaatcatagatatattgttctaataatcctccagccacattttgattctttcgagcattatagagtggagttatgatgtcacaaattcttaatctgggtttgtaaatgtgttttttttattgctttggctttttttttctttattcattatctgtacaaatacatgcatatcttaaactcctcatacatatgtgaatatatatatatatatatactagattgttcaacaaaactactttacttaaattgaaagctcatggaaagaagaaaataagaaactacataatttattttttttttaacttaatgtaacacatgtaatcaaaaacatcatataaactatacacagatataccacacaaattcgtaaaagactctatttatttttttaagaaatgggtattgatattcttcaaacatattcatccactgatattttattagcaaacgaaaaatgggttaaaagaaatttccccttaaaatcacaaaattcaaccacttcctttgctccatttggcgctcaaactaaacatgaaccacacactttcttccttggttgttccgatgcacgttataacgagtcttgtctcggctacaatcaaggtgaggtattcactgtaaaaactatagcaaacatttttaaggaagatgacatttctactgctgccgctttagaatacgctattgattgtgtcggcatcaaacaaattgtggtctgtggacataccgactgtggtggggtcaacacttgtcttttaaaaagaagagatttattgccaaaggcaaatttatcgaaactgtactaccatttggaagatatcgatcggattatagaaaataactggagttatatcaccgagactgttaaagatgaaaataatttgttattaagaggtaagataatagctaaattgaacgttcttgcccaaattgagaaattgttgaagctagatgttgtcaaaaatgcagtagaacttaaaggtctgaaaatattaggtttgatttatgacgtggatacacatctagtagaaaaagtttaacaacaacaacaacaacaacaacaacaacaacaacaacaacaacaacaacaacaacaacaacaacaacaacaacaacaacaacaacaacaacaacaacaataataataataataataataataataataataataatagctcttatatatattttctcacaattatagttttcttttttttttttatttctttttatagatttataatatattccagttgatcgtatatatcattcaaagagatttgatttttattcttcttctctttttttttttttactgatcctcttttgttgatttaacatttttatatttatataaaacttcttattatcttaaagatactgacaccttgtttctgaattcggaaaggtaattacgagacgtgtttcttgcggaattggattccgtcgtaattctgtatttacacacccatacatccagaaatttatgcacaactttttttttttttttttttttttgtaaagcaataagaatttaattcaaaacaagacatatacatatatatactaattaataattgactatacattaatcttacagtttggttctttttatcagtttaatttttcagatagttggttttttatatccatgtctaaacattcagtataccactctttcctcacaaggtacatttattttctaatctgctcccatcgttagacaaacatcatttcaagtatggataggttcggcaacgtttctgtattgtcacctccacagtttcaaaaccaacatcaaaatctacaacaacagcaacaacagcagcaaaattcttttattcaacaacaatatatgtctgctacacaaccacaattgtttaataattctaatactacgaacaattttacaagatccgcattttcccaacaaccttttactactatgtcaaatcccatctctaatatgtccacctccgcagctgcaaccactaataataacaacaacaataataatagtcttattaacaattcatcattattctcctcaaataacttcaataacggaaatataaacgcaatgaataatccactttcaactaccactaccactaccactactgcttcaggtgtaaacacatcgttatccactaggaatactaactctggacaacctcagtggttcactaattcaaaaaagagagccattccacaaaatattgtcaaaagaccatcttttaaacgtgtcataaatcctaccgggaaaaatccaaatccattgaatccacttaataaaaaaaatgaggactgttctaatgatgatggatttgatactatcagctttggttccaagaaaattgtttcccttaacaatgaaaataactttaataactccactggtctaagcaatgctgtaaacaacactttaaatgctgataatttattacatgattcaactgatgtgccaccgatggtttcattaaacgattggaaaacagaagaagagtttaagtccacatcaattttacctattaacaacaatgtatcaacttcgactacttcacttttcacattacgttcctccaataataaaaataataataataataatacaaacaaaacattgaacaatagctctcatatatcccatgtaaacaatgcttttgataaggattccagattaactaacaataacggccttgtttcttcacctaattttactccaaatcaacagcaaaataacaacagtaaccatctaaatggcgaggtgtctaatgacacaacaaacccatcgcaactgaagcacgaatttgctattattgtgtttggttatccagaatctgtctctaatttaattattacccatttctctaaatttggtaatattttagaagatttccaagttttaagaagttctacaggaataagtaaatttaatccaaagactaatggaaaaaagtatccaatctttactggtgatggatggattaaattaacttacgattctcaaggatctgctatacgtgcattacaagaaaatgggaaagttattactggttgtatccttggagtattaccatataataaagaaattgtggaacaactggcttcctgtaaaatatcaaaatcagaaaatattggagaaaatgggataacaccaagtatcagcccgataactgatgactctattcatacaccagcaatatctagtatagaaaatggtgtaaatgtcatagccaattcagatctaaacaaaaatgatagcaattctccaatgaaaacaagtaatataacacaaggtagtaaatttttatctaatcatagattaacaatcaaagatgggaaatcattatttattcataacacaaatgcaaacaatcataatttcttacaaaatttagaaaagaaaatgcgtgaacaagaacaattgtcccaaagtaaatataattctacttcaattaattctacaaataatacatctttatcaaagaatcaaacaaataccttgttacattcagttaataattggttatttggttggaataacttataaaatgcatggtgagggagaattatagtcaggtagattgtgtaatatatatatatatataataaacgattttttatacatgtctatttatatatatttataggtaacaggcatctgtaaatttgtataatattgatagggtcatggaatttattacagattaaaacctttctttattttttgactcctttcatattaactaaaatatcctttctggatccaaggtatattttcattggaaaaatatgttgttttgttaactcattcatttcaatggatattataggtgaatgattgattgtaaatttaaagtcattaataataatacctttataataatagccactttcatcatgtaatatttcaaaagtctctgaatcatatatcttaactgaaatttttaaatttaaatcaacacctcgatcaccaatacatttgttcattggtgtaagacgaataaacaatgcattacttttgatttctttatcaatattagaaatctggtattgtatatgtccatgattataatcatgctcaagagtgggtgatgatggaaattgaaatgtaaattcctttctatacggtaattcaccaaattttctatcaattctttgtaataaaatatttttattcaattctaaatctttagtattattcttatctttggaacaatatccaattagtttaaatttatttaaaatagtttcattacttgaacaagtacatattaaaagatagttatgatttgtctctaaggggacattgtgtttctcatagtgctgtatatagtaatactgatcaaataagatcggcttagatagatataaatcatctttatcaaacaattggaagtttagctttaaatcatttaattttgataaaaattgcaaagtaatcattatttctttatcaattttggattgaacacacagttggaacgttgggttagtgaaatattgggggtgtccatagtttttattcatctggtctgtataagtaagaaattctgtagatttataaatatcagcagtgtccaacattttcaattcaatattattttctactgaaaaacaatggattgtgaaccatttagatatattggagtaacagataaactttttatttttaccctttggtatatttatcttaattagttgcaatccaatgttagatgcactgtctattggcataaacaatggatcagtcattttgtctggcacaggttgtagatatgcataatgcacttcagtaaaatggtttggtgttaaatgtgtctccaaaagaacccatacagtttcatttgctgaggcagatttgttttggatcgaaaatataggtttatcaaaattagattcaaatttattaaatatttctgtatcgtaataaaaagtgaatttggtttcagagttaaataatttgtttgtatcccagttaatataaatttgagagaacttattttccagttcatcctctgatatagtgagagtagatttagaatttaatggatcttgaatactaagttctcttttctttgaatcaaatccaagaatagaataatcatggttctttaaaagaggggatcttaacttactagagtcatcgcctgttccaagagccataatacataaattggcctcgaaaaactgttttaatttttcaaaggaatatttcttagtagaaccaatttcaggtagtaacccagtcaatagatatgtgtccatggccacatttgatccactgctcttatatgtgccaccatgaatttgtaaatatgctagttctactattttatctttaatattattactatataaagataattgtttgtgagtttttttattgtatggaatatgatctgtatcaacagaaattaatctattaatgcaaccattaaagcatagattaaggtgatatcgattacttggtgcatctgaaaatttctctattttgggataatattcatgtttaaacctattaatatttattaaagaggtaattagagagcaatttgatatatctggattttgttcaatagaattaacaaccccctcattgacagataaacttgttacatctgggtatctttgtgtcagacttgttgatttatcaagatttagtttcaataatttagtattattccatggtataggtgaagcatcctcaatattaatgggaggatacatcatatttccaaccttggaagtctgccaaaatttctcattattcttatcataatttttcatttcttttcctatttgtaataaaagttttatcaattttgagttctttttcttcatattttgggagtattcgatcaattttttaaatttttgtctagttattaatttatctcctaaatatacatttttccaaagattgtttacagcctcccatatttcattatcagcattaagatcgctttcttgttttatatttgactcaattttagttctatctgtgtgtacttcagaattaccttctatgcttaatagtttaactttatctgacaacattttacctagagttatttatgcataaattttacaacagatatataccttatcagttgaattcttcgtttatcacttcattaaattggcattaccatttaagatgaaaatagaaaacgaggaaatttagttggccatttttgtatcagctaaaaggttttaaataacctaacacgcacaaatccatacaacacgctgttaatgtctgtctatatgcgtattatttcatatctacttgaagtaattaaacatctcgaaaaatcatatttccttttcttttaaatttttttgtatattcctatttttgacacatctattttttttggtacagagttttcatatgatctatggctattaggatatacctcatataaatagacagatcaaccaacctaagcgtattttaaatcagttgggaggtttgtaacagtttgtatgataaattatatcagcagagttctaaaatacatcaaataaaaagaatacatagtctaagtgtgtgtttcaatatacattgaattggtaaaatggatggttgtcagtcaccttcctctatttttcttattaaaacattcattgggagtaatattgttgctttaggttctggaactccttatatgtattcgtattatgcaccacaattattatctaggtgtaatatatccattaaatacagtagcaatattgcattggcattaaatattggtagttcattgttgggtacgttcgctggagttctagttgacattaatcctagaatagccacattagtaggttcgatttccacatttctggcttatactatcttgtatatatgttataaaaatgcaatttcttctattttattgatctttttggccttagttttagtaggttatggtgccatatctggattatactctggtatgaaggtttgtactactaattttccaaatcatagaggtatatctggtgcttgtccagtttccttgtatgggttgtctggtttattattttcattgatatgtcgtaatatctttaagggggatattcaggcagtttttttatttctattaattgcatgttctttaatgacatttattggtgtcttcacattagatgtttttgattataattatattaaagatttagaatccaagtatgttttaacagacactattagtagtcaaccagaactagctgcaacattgtccaattctgccgaggatgaggggtcatttttgaaacaccatatgtcagattttacagagtctttcaacgatcatgctgcacatcattataggactgaatctaaatcaagacattcaactaaaatagctcgtttctcaggagaattaacaagaaactcaagagtaggatccccagaatgtatcgtaaatgagatagctgatggtgtccactccttattaaataagtcaccaggaccatcagtgagtagtgtaaatgaacttttcagtaataataatcatttaaagaataatttagtagttaattttaaagaaatagtgaaaaatgatcaaaatatttgggactgtgtgaaatcaagtaaatttcttttatattatgtgattattgcaattttacaaggtattggtcagacgtatatatattctattggattcattgtacaagctcaagtaaattctatgtcaagtgataatagtaacaataataagccagtagatacagctactattcaagcaacacaagtggcaattgtttcaatatcctcatttgttggtagattatcatctggatttttttcagatgttttaaaaaaaagattaaactcacaaaggatatggactacttttactgcatctacgtttacaataattggatctataattattattagagtcgatccaacaaaacattcgttggctaatgtttataaatcttcaataatatttggatatgcgtttggtgctatgtttggatctttcccatctattatagcggattcattcggtacaaagaatttcagtaaaatatggggagtatgtacaacaggttgtctgattacaattaaatggtatacagcaatattagcacaaaatttatccaattatacgcaacctaatgaatcaacatgtaaagcaggtgttaaatgttatgaatatactttttatgttattagactaaatgcctttttaagttgtattttaattctgtttataattgggaatacttatcacaaagctaaaatcaattaatcaaaaatttatatgtgtatgtatttatgtatatcgatatacttgtcaaataaatatgtcttctagtagtttaaatggaattggtattctttcagcaaatatcttatcagagttactaaaatcaaaccttctaccagctgcatccccacaataccacttccaacaatttttatcagttgataaattattcatttttaattgaagatctttcataaattcatcatataaacctatccctggcttgcgcatctcctcaaatttatcttccacagtaatagtggaaatattactgttttcgttaccttctttgcatattttaacattcttaaaatgggccaatttaacaatgttattttggttagatgcagatgatatagttttactattcattaatttaggtttctttgtagaagaatatatccataatcttttcaacaattcattaccacctccatgagtttttatatcctctaatataagattgatcttcatattaaatttatgataactttttgaatttcttggaactgttaatacaccaccttgattagtgaaaatgacaataagagcaaatggatcgtttttgataatttcaagcaatttctgtacaacagagacattattattgtatttgacatattgccaatcatctgcagttttgttgaaaatggcatttgatgtctttggtttaattaacgtatgatctaaatcaaaaccataaagatttggtgacttatcaaaccttactgttgtggttggtatatatttaattatataaggtttagctatagtctgatgcgacatgataaagttaatatgaaataagcaaaacctaataaaatcaagtcacttataccccaaaatcaaaggtagaacaggaaaaaagttagaggaggggaactggtatatatggttcacctttatggaagtttccattcaattttatagtaatttacgtttattcatttgatttttatttcaatctatctattactcttactgattattttctgtgatgggtttgtttttatggaagtagtttataggatcaactttgaaaagttgctcgagaatagtaagaaaaagtatatttatttatttataaagaaaatatatacaagtagattacataccaagtaaaagaaaagatttatttcttaatgagagataagaataccgtagtgatcatataagtgtcactttatccacagtttcaaagtatttacaaatatctgaagtattttcatcctttggaatgtaaatttgtttaatttcagatatttcattctcaaaatccattgcgtctgacatattagaagggaaatcaaggattgtgatcttgtcaccaacttgacaatgttccttgatgtagtctcttaacagagagactaacattctatcaggtaaatgatatatatattccctattaccatatacagactttatatcattcaaaatggcttcatatcttccattcgaatcatttctgaaactttctatcacttcgaaaggatcaataaccaaatttgaaacgaggtttaattgatctaagattttcttagttgagctattattattatggctaaaatataaaagattaacatcaatctcaccaggagtaaacaatgtaactcttcttcttaaacctttcatcatattagtatattctatatctgaaaaggtagtcttcttttgagttcgatctagggaattgacagtaaagacaaaaatacctgtacctactaaagccatcaatatgatatttctaaaacttgggacatctctctttgtggttgatgaagacgaagaacgtttgttagaggaggactgattaatgaaccatctctttgacataattgaaaaagaaggcagtggtattaaagtaagcggttttattagttgattcatacaagggcgaatcaattgtcttgttggaactcttatcatttgtaaaagggattgttacatcaaatgatttgttcaataaacagttacctgactgatcaaaaggatcaactggctttgcagttattgtaacttagtgtaaaaaccctcgttaaaaattagtcctcaacaacttgatattgataaaaaaatagtatatgatccatatgatcttccttttctcatctaactttctgtgtgatttcaacatataaggttttttttataagacttctctttctttcctcgtactatttctttcgttcgagcctttctttaacccgctcaatagaaaaaaataaaatttcgtattagactaaatttgaaataaggaaagaagatatgaattacacaaacattattacctacatgtacaagttttggtagccaatattcacttttggcttatttaggtatatgtcctttattaataattgaagaaattaggatattgaacaacccagattagattgcaaaagaacatagtcccattagttatttatatatatacatatattcatctagttttatcaccccatgtcattagttgctttagcccatacctgtgcacatttgcaaaattgtactcgagttagattatcattaacttcgattccttattctaaactacagttgcaattcgcttataatctctataaacagggtttcatttcttcattacaaaaggggtctacgaaaggaccggataaagaatatgtagaagtcactccagataacatttctacaagaaggttatggttagggttgaaatatagagaaaataaaccaattttgaataaatgtcaattgatttcaaaaccaagtctacgtatcatgttaaataatagtgatttaaagagattatgttccggtatcatgattcgtaatgttaaacctctacagcctggtgaattgattctggttagaagtaaaggtactgttatggatattaatgaagccgttcagaaaaaacttggtggtgaggttttatgtagaatagattaaattaaccaattatttctatattcctttatcacagatgtatatgtccataggagagaaatataaaaatagaagtgttttttttctttaaaaacgcgattatgtattaattataaataagctaaaagaagtttcatgtatataatctatcataatatatataatttatccgttcttattttgcccttgtctttaactttgcatttttttttacgtttttttcttttgctatgtgttcactctaacacatcaattagttcattaagctacaaccattaagcaataatcacaagatctttttagttaaacttatatatatagaaataggtcgtttaaagtagtatacaacttttttatttatatgactaaaccagtcatgttctgaggagggaattacaaacataaaaagagcaagtaatcaacttgtttatgacatataatacgtttactacctagaactaatttaagacgacttggtagtcctagcttatataatactgagaggcttttgtgtataaagaaactagcaaactgtcgtcgttttcaagactatcataatatactttactgcttttgctataagacgatgctggaattatttttataaatttaatgaatatattaatctttcaagaaaaagaaaatagaacctcggaatttagggaaatctccttttccgcaatagtcagagatgaaaaaaattgcggaatgttctggatatccttcttgtaaaggacgaaaagctatgatgagagatatacttctacttcttttagaatataaaatgtgcagaataatttttggtttgttgttctttatatgtgatataataattgtactgcttcaaggaagtagtaaagaaaaacggatatacagataaatatggtgtttataaccataaagaacaagaatgctgttgttaattaaagagttcgtagtatttgtctacatcgacagcaggcgtcacactccccttaactcaagtcaaacacagctttttcttgagatcatgtgataatcttatggttatgtgtttttgataatagttaatcttgttggaataacaatatatctatatatgtctactctacaataactaaatagtacacgcttttgtactatatctatttttatttaatccttggttctttgtttgttcgttgtcctttttcctagttgttctcttgtacttatgttagttatttctgcttttatgtatgtttgtaaatttttgccaaaaaggaaagtttagaaaaatatcactaaccgtcattttgttaaacaaaactctaaacagtaatatcagggataatacatatcacgtgaccaaattaaaagtgagtaaaaaagtaaaatgctccaggggaggttcgaactctcgaccttcagattatgagactgacgctcttcctactgagctactgaagcctcaactcgatgtgaggtgttgtggaatagaatagttataaccatcaagattacataagatcctgaatgaatctagaaccaattagtgtattaataagccatacatgtgctacaacattagatgctgcataataaaaagattggattacataagatcttggcaaatctagaatttacctattgttttattaagtcccacgtgtattactaatcaccatgattagagaattgggatgcagttctaatccagtagtgcacctaaattaatataataaattttagggtttgaatcagtcaagtcattaatgtagtaatctgaataatcgatcgagctccagaaaacatataaaaggacaacgttttcaggagataaaagatcatcttccataatcgtttcttgtaaataatttatatattatgtataaacaaaatagaacaagcaagtaacaagttaagtaacttcgaataagtacattagctcgatataagccgcttaatatataagaccgttttagtaattatactatcgactatagttgattactgtctcgattatttgaattactattaatattatttgcgcttccctggaatacacaaagaacttcaccataccatactacaacatgaggcattgaagtaaataatatattagttcttattataatattaaatggatattaaaataattaaagacagtaattattacaaactgtaaagcaattactagacaatcttaatgtattaaacagatatattaagcttatgcttttatttgttcttttattttttttatatatgttggaatttgtagcacttagcgttcattgtcatgacaaacattcttaagttataggtgctcattttatttttgtattaaatatatatatttacttattatagactgtatacagtataaattattttatttattctaacttttttttttgaagttttctatgtttttgaatttttgaaaaacatatttagtgaaaaataaaatgttttcttaatattatggtacatttgtctaccatataatatacagaaaaaactaattaaaaatagtttttatggaaatgacggtaatgaactcttattttccaataatatagcatataagatatatataagagaaaagttacgaaaaatagtcttatcttcggagagtgttgtctttttatacgttgcagaaactcgatcaagtattcaatttaatgtattagtgaatttgtaattcacatcctaattatttatttgtgagaattcaacagggcctcaaaaaacatgtaggataataagttatggtataataataatacgtggtgtagtaacacaatagagtgttttagatttagttaaaaatctgcgtaatgttggtggcggtaacatcttattatataacatgcaagatatttgaagaggtgattttaatgaattgtgcaattaaggaataagtaaattggtttcttagtttgttaaaatggtatgcagagaatgtacatatatatatatatcatgtttataatcaagcttaatttggtccttcataatttttattctctttctaaaacatttttcttctctaaaaagatttttttttctataaataaaaaagaatgttaaaaatatactgaagagaatactttaatatagaaaactggtaaatatgccgtctattgtctaataccatatatttctatttattgaattcgcttgatatgtagaacaaatggaatgttttttcctgtaatgttgttgagaatgagcgcctgtagttattggagacatagtaaacattctcaatattatattaaatagatttagtacacaaaattataatagagtttttcactttctttctttatatataacatagaagtaataatatacaaagattgtaaataagataaaaataatgtatgatgaaatccttgactttatatatgttgacattaagccattttcctctacgaacagtaagatatttaataaacaaactcaacaacttttggtgatctcctaacaattattactcaacaatttatcgtttagtatctactaaaatcttattgttctatctatttcattctagaacattctatttcaacaaatgtatatattagaaacaatactaattaatcatgactttatatttcaacaatattttaagttcataatggctttgtatgtgtgtatttatggaaagtcatattggttattatacttgaaagagttgtgtactcaaatggtgattatttttatgttttgtcagccctttatgtatttttttttttttttttttgcaattaaagagtaaaaaataaacaatgggtaaagagtaaatccaaatattcgtaacaaacaaataacaattttattttaatatttaaacaataagaaattgtcatggaatgtttaaaaaaaactgtaacaaaaataatttgagaataaaatatattaatattaaaattataaaaatgaataattatttataccatatttggatctttaatagaacatataaagtaggtcatacatataaaagtactgcaattaatataataattgttactatagaattaatagttaaatggctgattacaggacaaaaatcgttaaaaattaataaacttataaactaggcagaatttataaaagattttaaatcatgttacaatatattttctatacctttactttataatatatgatacaaaccatgtatatgtagatactaactcacatattgtataaatattctaatatattttgctttcaacttactccaaacacctgcttaattttatagattataagatttaaaaaaaaaaacactgaatgtagttacttatctgaacaaaagttttccagaaggataaatatccaacatgacatataataaaaagcttttctcttttaataactttacatttcaataattattaaatgtctaattactagaacaactaattctttatcagcgtttgtgatacccattatatacttgttaaaaaaatacataatttaataaatgaaacaatcgtttatatataaatgtagaaaacgaagagagagaaagagagtaagtgaatttgaaatagaaaataattaatgatgtattttcttatttttatttggtttcaatacacaaagaaaaaaaaaatacaaaatctttttatacaattattccacatagatatttttcatttcagccacttctactaatacaaaccataaagcaaactttttttatgtagtataatctgaaaattcagaaatttttttctaaaatgttttcctacatggccttcatatagtaaatattattgatttaacctcctaaaaatgtcaacggatcttcatttttccaccttctctctttctaatacgtttgcttatgatttaatggtaattttccctttatatatattttttactaccataaatacctaaataagctatcttatcttacatgaaggaagttatgaagaaaaacttggaagcagtttataaaaagaaataaaaaactgtgtcaggatagtaaaatattcaaatcaaagtaaattgacaaataaatatatgttattataatacacaaatatttagaaataaaaaaattatataatttgtttcagattacttattacatcaggcccatttacccaataaagccattaaacctgtaccacaacacatgataatatatgcaactaccattttcttaaaaccttcacgacctttaaattcattagagaataaaaactcatgggccattaattctaccaaacctgtataaatcaatatacctgaagaaatagaatcaaagacaccatttgaaattaatgcctttctggatccaggaataaaagaatgtctaacgccaataccaatagccactgcaataggtgtagtcaaagaaaatgccaatgccatcaaccatggtgtaaatcttttgctttttggccaattagtttctgcaattcttgttcctaaacccaaaccttcaaacatttgatggaaaacaagaacaataaataatgtttcaaattcatcaccagacacagctaatgacaatccaatgaaaacagaatggaaaataataccaaattctaaaaacaacactgccaaaatttgggatgaataattttccttatcatcttcctgcaaaggtgtccctatttgacttaaatcttgatgatttttttgatgatcataatgaccttcaccgggaattgctgtaaaaactcttttagactgctgttcaggtttattctccacatcattatgatttaattttacatcacgaacaaatacctttcctttgtcagccaaatcttcattatcagaatcatctaacagttttttatcatcatctactgtcgattcttcttcatggaatgcaccttcgattagataatgactaacaatttctactaagaaaagtaaaaatagagacatcaaacaaataccaaaagcccatggatattctgctaatgtaccacctaaacaatcattactcaacgcctcattcgcgggttgtaacaaatgaataaatgctgttgctacaataacaccagacccaaaaaattttgctataaagaaacaccaattaggcaatctgacaaaggaatatctagatgaaagaataggaaaaaaagcaccaagagctgatgagattagaattataaagatagataaaattcttaagttagtctttccatcaaaatcattttctgtaggacattgtgatggggccgaagattcatcatcatctcttttaaacaataaataaaaaagtgggtttgaagtatccatagttaacaatttttctgaggctatctaagtttttgtactttctatatgtttataccactctatattttgtgttgtgttatacataatcactgattacaagataaaatggaacaaaagcaagttttgatttacacaagatgaagaaatacgatacaaagcgacttattcattcgaaaggattacagtatccaacaatatccagcttgcattgctattctttttatatcttttatatatctaacctttattaattaaggtaatgtattttaaccattacagttaatttagtaaaatgtatattctgagtagaaagaaagatctgatatcaattagagtaaaataacctttacagtatttttcaagaagaattgtttaaatgattcccttcaagaacaaaaaaaaaaaagaaaacaggaaaagcacaaaataacaatggtactatcaaagaatatcacaaataattgattgtctttcttgtcattataaatgataaattttgttgtataatttatgcaagaaataacctttacaaagggcactgtagcatacataattttctaaaagacctcttaaaactttaacaataaaggctctattagagctaatactgttttgaaaataatatttcacttaaatttctacattcattcttttgttggtgtaggttcttttattgaaaaaaaaaatcaacaaaaacttgctctttaatggcatatcctaaaaagacaaacaaaacacaattcttggagaagattacaagttctaagcagcagatatagccaaacctactgaatcaaaaactacatgacttgataatgttacagataaaaaaagatattggtttaggaacctttaatttttttaataacattaaattttcaattgtaaataggaaatattattgttattattgaattttttcttatcctcttcatgtatttcaacaattgagtctgtattttcaatacataaaataaaactttttaaatctacagaaaagtatatatctctctatatactattaatatctttatttacgggggaatcgattgaatgacgtttcattttgaatactaaacttgtaccatacgaattctctttatttgaatcttctctgttaaatgattcactagaagacggtagattgcttgatgccagtgaatctgatcttgtggtaacatctttgcacaaaaggttagaacttcttgatggttgttctgtaagaacattataatattgcttaccccctatacaaatcattttattttgatgtgaaaatagctgttcttccctataataaattttaccacatgggcatacaaatttcttctttaaatgggtctttttatgtctgattaaatcatgatttctaacgaaagctttattacaaccaggaaaatcacaactatatggacggtcttctaaatgtgtttgaatatgcgttctaatattatatcttctcttaaaaaatttaccacaatttggatataaacattcaaataacctatccggtaattctttaacgtatctatccaattcatctctagacaactttgtaaattttcttgatcctttagacggactgaccggctttacctgatgctcagattgctccaattgtctgtttagatctgaaagtaacttctttgacgaatctcttaattctagggttgatgatggtgttttattgacatgtataaaactttcatttaatttgcttgatttagaaatagcaggaatttttttcaattctttttgtgatgaatacacaaaagggattgggtttttaataattgttgatttagagggactcctcgtgtcatgatgatcttcagatggtggcattaaaatactaataggactaatatagtctttagttcttattggggtatcttgaaatgtggttggaagatcatctaaaagagtagcttctttaaagttattattagtaggcgatctattcaatacatcatcagccagtggctgcaatgaaattagatttgtatttatatctaaattctgtcgtagatcattccctaaaacaggtgaacccttatccaagtattcacgagtaggtgacccaacatacaatctgtttggacttgcacgaatgggtgaagatagagcactatccgttagaaaattatcttgatcttttggagtcaaagttgtagtaaaattaattttcaaattcttatctttaatcctttgaaatttttgttttgtcgaatcgttatctgatacattatttttaaatctgtattggcgtctctttggggaactgttattaataccattaccattaccattattgcttttattattgttcttgctcgtagaatgcaatgaatttacaaaggatagttttgtgttttgaattttcttgataggcgaattattcgtacttttgctgacattaaattcttttatttttttcttaggtgtgttatttaaccttgaggattgtgtaatatcacctaatacaaacctcactgagcttaaagcttgctgctcctttaaaatttttcttaactcttgttgttgtagctgtgtttgtttcaatttttcttctaacaacttattcatctttttctgtttttggatctcaatatttaattgttcttgttgttccaacaattgctgatccattttatttaaattatctagtatccccgtggcctgattactattatttgaatcattagtagtatcttgtattggaacacaaggtaatggattagagttaacataatctaagagaagctcgtcccagattaaagagttcataagttctgctggagccacattctcttgacctaaattatttttattatttataagaatattgttactttcattttctttattattatcattatcattactgctattattattatatgtatataaattattatctgtttctatatcaataggtgtcattggaatatcttgattatcaataggaaaattataatccccatacacttttttattttccttgccatcatcatgagcgccatcagcactattgctagataaaaaaatgtcaaattcattaagatttatatcctcatatttactaaatgtagtcctcttttcatttttgaataaatcaataggatttatcatccacctagtttcatttgaatccatgagtaagacaaaattagtttcactttgattgtttccttttttttttaccttctacttgatttaccttctgataaataatgaacacttattaaatgtaataagcaaatattaatagccaacaatgaaaacttgttactagttttgaaaaaagcaaaagcaaaatgcaaaaaataggtcatacaaatatgcccatataaaacttaacaactataatgtttgcaattctggtttatgtatattacaatgcaattaactttagtgttgcaacctaatcgctttaagccaacaaagtactgtaaaagaacaattttctcttgttttaaggagcaacaaaataattaatatccttataccagtttcaatctcttactttctattgcaggaattttttctttcttcctttatctttctaatttttttttgatttgcaaaattcttttttgaacagatctggaaaattcaatgtttacatattaccaaaagaggtaaacatagtgatccctccactgcattacctaaaatagcaaaacaggacaaaatgggacgaattgtgaagataaaaaaaaaaaataaataaaagaaacaaagatcacaaaaaaagttcttaaagcaacatcaacaagcataaaagcaagagagggacgaaaaaggagagaaaaggatcaacactctgccataaattaaagaaaaggttgtgccacctcttcatcctgatttgactctaactaggacttgttgcttacaatattctattgtcttgtactgtttcttgttttagcacccaacaaaggacaatatttaatatcattatttaatctctatttatattctccagaatactgtttaaatgccttctttttatctatatataaatattataacttatttcatccttttcttccttaaaatttatatcaaagtctatttttctatatgtatatatagtaataaatcaacatagatgagtatcttgattaatttttttttatacaacacaaaacacaaataaatttcattattgacttgtgcgtacaaatagatatagatactacaaaataaatgaaatagaaacctgatataaatctacagttgctttgtaataaaatagtttttacagcattctatacaagtaaagagaatcggaaatagaataccagtacaaaaataatccgtagataagaaagtgattagaaaaaaagcactgacgagagtgaaaaagagcagtgaaatatccaaaatttagataatatatcattcattttttttggtactattaatattttcttctgtttctgttatttgcctagattatgaactatttggactgtacaattccaattgattcaccttgggttctagttccatatttaactaataatgaatataattcatacaaaattaccaaaataaagggtgcactgacaaatgttatttataaactatcaatatttgatgatggcatttgcacaaattatttagtcagaatttttggtagtaaaatgaattctttggtagatagagaagacgaattgaaaaatattcaaaaagttccagaagaagttggatcggttaaaattttactaccatttagaaatggtagagtagaaaagtttttagatggatttaaatctttgtcacaaagagaaatggttagtgaaccatttttcaaagttattgctcacaaattttccatattacatttccagtcacccaaacctgataaatctgatattaacagatttaaagatggttttgcatggactaagatagaacaatggctttcaattattgaatctccattaacaaacgattggttacaaagaaataatggatataaccttaaaacttttgtattatctaaagattggagtagatttaaaaaaataattgcaaagtataaagaatgggttctatcagattattcaaatactaataattcaatagttttttgtcataatgatactcaacaaggcaatatattagtagaaaagaatacttgttataatcaagaacctaacattaagtttattgattacgaatattctggcccaaattttattgcttttgatttatctaatttccttactgaatgcatgcatgattacaatgttaattcaacacaatcatatagatgtcttaagtctaggtatccaagtcaagagaagattttaacatttttaagtagttatttatgtcacaaaaaagataataaatcaaaagaaacaattcgagttgaagaattaaaaattttgtataatcaagtaattaaatggagaggtgttactcaattgttttgggcactttgggcaattttgcaaagtggtggattaattaatccaagcacttgtaatgatatggaccaaaatgatgaatatgatgttgaaacattatcttcagatctaattgaagaagatagtaataatcattccaattacagtaccagcgaagtttctaacgatattaataagaatgatgactatttcgattatatgaatttttgtaaagataaattatcattcttttggggtgatttaattaaattcaggatcgctacaaaagatgactgcattatggaagatgtacaatatttagatattaacttaattccgtagaaaatttataaattacacatatattataaacttatactttttttgcatagtgacagtatcaactataaatatacataataatatcaataaatttattagcaacgatatcggaacataccactaatttctgaaaaaaaaaaatatagatactgttctagaacttattgatatactttcaaaaaaaatcaaaaagaggttaaagtatttgtgataatgttgttttttttcttctgaggaataaatatatagtgaatataactaactaaaatgaatgttattataacataaaatacaaggatattgttttcataataagttgggcccaaaaaaaaaattagaaaatcaaagattcaaatcatgctagtaacatttttctcggatcttcaactaattccttaaccgtcttcaagaaagtaacagcttctctgccatccaataatctatgatcgtaagtcaaagccaaatacatcattggtctagagacaatttgtccatttacagtaactggtctttctttgacaccatgtaaccctaagacagcagtctgtggcatattgatgattggagtaccatataatgaaccaaagacaccaccattagaaatagtgaaggtaccaccagtcatatcctccaaagttaacttaccatctcttgccttttgacccaatcttgcaatttcttgttcaatctctaagacagataacgattcagcgttacgaacaattggagttactaaaccctttggtgtagccactgccactgaaatatcagtgtaatcacggtagacaatatggtcaccttcgattgcagcattaattgcaggaatatctttagcagctaaagtacaagctttagagaagagacccataaaaccgaatttaacaccggtcttcttaataatttcatctttatacaattttctcatttctaatagtgcactcatgtcgacttcattgaaagtggtcaatgacgcagcagtattttgagattcttttaatctttcagcaattcttagtctcattctattcatcttgactttattttcattacgttggaatggagtgaaagattgggatgcagtatttagaggagtagtagtcttcttttctggcgtaatgggctttggaacagcagatgatggggtttccttctttgtgtccgcagcatttgcaggagaagatgaagaagaggtttgtcttttggaagcctcggaagaagtagaagaagtagtaccagcaggagtagcagtgtctgcagaagcagtagcagtagcagtagcatcaccagcagatacttcacctggtttgatctgggccaattcttcaccaacggtgacaatatcttcgggttgaaaattcaattttgcgatgataccagagacaggggcagtaacttctacgtcaatcttatcagtttcgatggtagctaacaattcatctgcggcaatatagtcccctactttcctggtgaattctttcaaggaaccttctgtcaaagattctgccatttgtgggactttaacagatgtggaattataacgtaaaccgattgaattactaacatttatattattactatatttgtttgcaaatttattggaacgagtaaaattcatgaatttaccgtcattgtttctattaatataaagattacggtggctatgtattatgccactggagactgtttgaatacatcttttgtgggttgcagttttaactatattcgttaatggttttttagcagttctagacaacatggttaaacaacttatgcgcgtgtacctgtactaatgtatgattttttttgtgtatgtttaaaatgtgatattagaaatccactttacttattactccaagccaattttttatatctttatgagtatattattctaatacaaaaatttccccttttttttccagatgggaacagcaatctattagaaaaaaaaagaaacgactgaaaacaacagtagagataaagttggttaatcacagtggaacatggaaaatcactctatgcctttatatatcatatggactctgcaataggaaataaattcttatatatatatatatgtgtgtgtgtgtatatgtgcacaaagaacgatttgaattaaatttaagattgaagaaaagtgccaaccaagtgaaaaaaaaactttacaagatggagatccgagaggaaaaagaagaagaagagaaagggtagagagagagagagagagagagagaaggagaaacaagaaggcttctctttactacagtcattgagaattctattgcttgatagcatcagacaacgaaacaaacagacaaacaaaacagaagaaccaaattgtcttattttagattggttaactacatataacaactactagttctttttatctctttttctttttcttcaaagaaacatttactaaaccatcattgacacacccgtaatcttaggaaaataaaaaaaaagaaaaataatcgtagcccataggtaatccgtgaaacgcacgaataaacttttatttttcttcggggaacaggaaattttttttttaaaaaaaaaaaagatgatagtaaggtaagtcaaatgtatatctctaattgttcttattttttttttctttttgttttgttttttacaagaaaaaaaaaaattaaacataaccaatcaaagacagttaaaaaaaacaaaacaaaacaaaacaaagtgctcatatcatagtttaatattttgattgctgccgttcttctccttcaccccccctttttttttctttacttttgcttttacttttaaatattaaagattgaaaaagcacaagagtgcttaatatggtaagaattcgtatgttcgattcttgattgttacatagttgcgttagtcttatttaattatttaattatttaattatttaattatttattttttgtctcccttctattatttgtgctgcttaattactgatttatcctccccacactttgctgtttttctatagaattctaatatatatattgtatgtatagtaatgtctgagtatttcttcttgacggcggctatttttcgtactcgatgatattcaagaaagtaattttttttttttttacttatttacttatttacttatgtatttgcaagagtgatgattgatgagatagatcttttcatcttgctattaatctaatattctccatgcattttattgtaaccattggattaaactggtttctacttaaattttaccaccaataatcctcatcacattagataataacaaaataatatatctatctatctatctatctctttatatgtatgctcacaaataaagagtaagtgccaacatatatatctataggaatatgtcaaaaaataaagaatcattgaatactgatggaaatggcaatcttcctgctaaaagcaaatcctatattaatttaaaaaaatttaataatttcttaactgaattagaacaggtccataacgacatatcagcatctgcacaattgaaacaaaataatattccagccttaaaaaattcacattctgaaaatttcatatctagcttattacaagacatcgacactctatcacaatctgacttattcaagtatgacaacttgaccactaacgcatccttggtccaacaatctcctcaagatatggaattcactataaatatgtctcgcaaattgataagcaattgtcgaagattgaaatctgttaacgaagctcaaaggaatgaaattaataaactgcatgttgaaattaaaaaaatttctgagaaaaataatgtcctcaatgacacaatatatgatttaaatgacaaaaattggatactcgaatcagacttatctaagattcataaagacttcagagaactcaaaaataaattcaataagttggaatacgagattcaatcttgtaataatttattaaaagataaagactctcaactcgattcgttaatatcttcaaaagagattttggaaaaggaattgaaagaacaaagaagtactttcaataatgacataaaattacttaatttacacatcacagaattaaatgacgaaaatgacgaattaaatgaaataattaaaaatttaaaaaatgatattgaacgtttaaaagttgaaagcaaaagacagaacgcaatcattactgaaaaacagaatcaaatcaacgaaaatatcaccatgatatctgagttacaagataaaattactaaaagtaaagataatgaaatatttgaaaatgagtcccgctctgatataatgtcaattaaatcattatcgtcagaagatgtcgaggactacgccatcaaacatgatttgaaactaattgataattcgatatttgacaccatgacacacgaactggaaaacttgagatccatagatgaatccttgaaaattcttgaagaacatggttgtgatcgtttatcttatttaagcctagacactttcaattctctatattgtccatcattagacacacttaaagagaaggctaaagcacataatcaccacattataaatgaagattctttcaattttttaaactcactaaataattctacacctgataaaaaattgttaaccgatttagctcaaaggattaaatgcaatgtcctatcgtcaacagaactatttaatatgaaagaaactatagatcatcctacattggaatacctaatagacaggactaaatcatacaatcaatatattatagatgaaaattcctatgatttattaaaccgcttaaatgcatcatcccctgataaagatactctagagactttagcagaacaaataggatatagtttattatcaactaaagaattatcggaattaaaagaatcccttgacagcccaagtttggtatatttaaaagaaaaggcaattcaggaaggccatttactaatatcagccgaggaatatgaactacttaaagagaagattaagaatccaacaatcgattatattactaagaaattaagagcttataatagggtaatcttggaggaaaaagaacttgaaaaacttaaacatttagtggaaaatccttcaactgaaaaaatcgacgacgttttagcaagtaaaaaactgactaagatatctttaagagactataaccatatgaaaggtgtcataaacaatcctgacttggactttttatccacaaaagcgcaaagattcaataaagtattgatcggtataaatgaattagaaagcctgaataaaattaaagacagtccctccatcaactttttgattacaaaagctaataaatataataaaactttaatagaacaaaccaaattacaggaactagaaaagctaaatggaaatccagatattgagtttttaaaagaaaaagcgtctgaaatagaattaacagttattccaacgacacaatatgacgcattagttgaaactaaagaaagaccaagcctagacttcttgaaggagaaggtacaagactacaaacaagtgatagttccagaagatgattatgacacattagttgagactaaggaaagaccaagcctagacttcttgaaggagaaggtacaagactacaaacaagtgatagttccagaagatgattatgacacattggttgagactaaggaaagaccaagcctagacttcttgaaggagaaggtagacggttatgaatatgtggctgttccaaagacagactacgacgcattagttaagactaaggaaagaccaagcctagacttcttgaaggagaaggtacaagactacaaacaagtgatagttccagaagatgattatgacacattggttgagactaaggaaagaccaagcctagacttcttgaaggagaaggtacaagactacaaacaagtgatagttccagaagatgattatgacacattagttgagactaaggaaagaccaagcctagacttcttgaaggagaaggtagacggttatgaatatgtggctgttccaaagacagactacgacgcattagttaagactaaggaaagaccaagcctagacttcttgaaggagaaggtacaagactacaaacaagtgatagttccagaagatgattatgacacattagttgagactaaggaaagaccaagcctagacttcttgaaggagaaggtacaagactacaaacaagtgatagttccagaagatgattatgacacattagttgagactaaggaaagaccaagcctagacttcttgaaggagaaggtacaagactacaaacaagtgatagttccagaagatgattatgacacattagttgagactaaggaaagaccaagcctagacttcttgaaggagaaggtagacggttatgaatatgtggctgttccaaagacagactacgacgcattagttaagactaaggaaagaccaagcctagacttcttgaaggagaaggtacaagactacaaacaagtgatagttccagaagatgattatgacacattagttgagactaaggaaagaccaagcctagacttcttgaaggagaaggtacaagactacaaacaagtgatagttccagaagatgattatgacacattggttgagactaaggaaagaccaagcctagacttcttgaaggagaaggtagacggttatgaatatgtggctgttccaaagacagactacgacgcattagttaagactaaggaaagaccaagcctagacttcttgaaggagaaggtacaagactacaaacaagtgatagttccagaagatgattatgacacattagttgagactaaggaaagaccaagcctagacttcttgaaggagaaggtacaagactacaaacaagtgatagttccagaagatgattatgacacattggttgagactaaggaaagaccaagcctagacttcttgaaggagaaggtacaagactacaaacaagtgatagttccagaagatgattatgacacattagttgagactaaggaaagaccaagcctagacttcttgaaggagaaggtagacggttatgaatatgtggctgttccaaagacagactacgatgcattagttgagactaaggaaagaccaagcctagacttcttgaaggagaaggtacaagactacaaacaagtgatagttccagaagatgattatgacacattagttgagactaaggaaagaccaagcctagacttcttgaaggagaaggtacaagactacaaacaagtgatagttccagaagatgattatgacacattggttgagactaaggaaagaccaagcctagacttcttgaaggagaaggtacaagactacaaacaagtgatagttccagaagatgattatgacacattagttgagactaaggaaagaccaagcctagacttcttgaaggagaaggtacaagactacaaacaagtgatagttccagaagatgattatgacacattagttgagactaaggaaagaccaagcctagacttcttgaaggagaaggtacaagactacaaacaagtgatagttccagaagatgattatgacacattggttgagactaaggaaagaccaagcctagacttcttgaaggagaaagcattagattatgggaaagtaatggttgaaaatgaatattttaagaaattatgtgacaatgttttaaatccatcgctagattatttagaagaaaaggcgtccaatatgggttactgtatggttttagatgatatgtaccaggagctaaagcataactttgatctgccaactcttaaatatctggaggagaaagcaaaggaaaagaattattttattctaacaattgaagaatataaaaatttattaaactatagggataatcctcatatcaatttcttaaagaagaaagcaaatgaatttaattatcttttagttaagaaggattctttcaagaagttaatagatacaaatattcacccaactataaagttcttggaaacaaaagtcaatgctctagacaagatcattattacaaaacagacattacaagagttgcaaatggttaaagaaaatcccagtattgaatttttagcagaggcctgtgaaaggttgaaatacgctattgtaaaaaaatctgaacttgaagaactaatagaattaagagaaaatactccaacagaatttttaaaggaacagttagcatcaaagggttatgaaattatttcaaaagaagatttacataagttatcttcaatgtatgaacaacctactatggagtttttaatagagagagctgctacacttcattgtagtataattaagacagttgaatatgaagcgatactaaaaaataccaacagtccgaccattgagtttttaaacaaggctgcttcaaacttacatcatattgttattcccttgaccaaatataatcagttaatgacatccatggaaaaacctactttagaatatttgatagataaagctaacttgtataatatggttattgtggcatctgatgaatataatgagcttaacacattacagtcatctccttcacgtaaatttttggagaagaaagcaagccaacaagatttggtaattatcccaataagtgactatcaagaattgattgacttgaaaaatatgccatctttatcattccttgaggataaagctaacaaactaaacaaagtccttgttagctcagaagaatttaatttactaaaaaatagtatcaactttccaaccattgaatatataaaagaaaaagcaaaaagctttagtagtgttgttatacttcgaacatcttatgaaaaacttactaacatacaaaacaatccaccattacccttcttaaaagctaaagctgaaagacaggaatacactattttaccaataaaaatgttaaccgaattacaaaataatttaaataatccttctttgtcatatctcagggagaaagctttagaacttaattattcagttatcaacaatgatgagttagacagactaagtcttattgaaaaatgcccaacattagactttttaaagaagaaatgtaacaccttaggatataatgttattgaactttcgcttttcaatcacctaaaaaatattgaaaacagcccaagtcttaagtttataaaagaaaaagtttcaaaatttgattctgtagttataaaaaaagatcaatttgaagaacttttacaaaataaaatcaatcccgatatggaattcttaaaatctagtattgaaaaaatgaattattcaatcattgaaacaaacgtcttacaagattatcaatctcttcaaaataaaccctcactatcttttttgaatgaaaaagtcgcgatgtatgattccgtgataatttccaagaaagagatcaccgaattaagaaataatttagaaaatccaaaggaagaatttttaattgaaaaagcaaggttgattgggaaattgatagtgaatgaaaatatttattcacaacaacaaactttattggaaaacccaacaattgcatatttacaaattcatgcaaagaaaaataaatacaatctaatagaagaaaacaaattaagtgaactctatagcaatattgaaaatccttccttgcaatacctaaagtcaaaatgcgtaaaatttaataatgtcttgattgctcaagatgaactagtatccctaaaggagaaattaaaccatccaactttacaatatttagaggaaaaagcatcgagtctacaatattccttgattgaatccaaacaattagataaattgtatgagatgatacaacatccatcaatagattacctactgaaaaatgcaaaagtttttgataaaatgttattagacacacaagaatatatgagtttgcagaagaacataaatgaaccatcttctgcatatttaaaagaaaaatgcacattactgggattaagtaccattgaaacatctaaattaaataaattaaaccatatcatagagaatcctgatattgatttattaaatagaggtgctaaattacacaactaccatttaatatctaaagatgacgaacgtgacttaaagaatgttgtatcagatatgggctttaggttacaagaaaaagattattctatagaagaattatcagagaaagcaaaagaattgggaatgataatgctaagtgtcgagaaatatgagcagttacaagaaaaattatcaagaaatgagacaaagattaaaaaattcgtaaactctccttctcataaagagctacttcagcaagtcaatgcgctaggttacattcctttgaagaaaaatgtatatggtagattacaagaaaaagtagtattaaatagaattcaattaaaaacaagagctttgcagatgggttaccatgttatatcaattagtaaataccaggaattgactgcaaaagactctcgtaaacttgataaaattgaccaacaaaaaatatcgcaaaaagcaaataatataaatgaacttataaaacaagctatagaactgggtatttcatgcgttcctaacaaagcttttatctctgacagcccactgtctaaaacttcaaagaaggaagatattttattagtaacaaaaccttattatgaaaatctaattttgacaggtactactaaagctgcagccttggatgataaggaaatattaaatgaagtaaagaggcgtggtataagagggatggaatttggaaattcaacttcaaataaaactaattcatttagaagatctatatctacgaatactgtatcactaagaaaacaagcaactaatttaagatctacacagcatcaaatagaatcgtcagtcaaaacaaaaacactgtcgtctataagtagggacagtagtattgataatttatcctgttttcatatgaataaaggaaatacaccaacaaaacctggtacaaaacttcctttatcattacgtcaatcaacaccatttcctctatctacttcttcttccacacaatctatatcatcatcaaaggctactgctataactcctattacaaagtctacgaagttggtaagccattaccaacataaaaaaagcaataactctttacaatcaatattctttgaaaatgaaaaagatgtagacgacgccattactaaatctttgacaaagacatttgttggtgaatatctatcaaagagatattctaaatatagtataatagacaatccatcctttactcatgaaaggtatatgtggattcaaccatataccatgactcttcattggagtaatcaagatcctagaacaagtactgaaaataaagtgaacagtaaaagtattccaatttgtcatgtcagaagtgttatcaatgaccattataattctggtttaatgggtaaagaaatgtatttcaagagtattatggtgttagataataacagccatcatgttatatttacatgcccaaataagaaatctcacgagacttggtttaaatctttatcctatcttattgaaagattatctaactaaagattatattttctgttgtaatatatgcatataaatattaaacgattgtacataaaaatttaaagattaaacaatctatatatacacatatatataaaaaaattcccataaataaaaaaaccatttatgatggaaaatgttgtcaaacatttaaatatttataatattagtcaattgggccattagagataaaaagtttttttgaagaacaacttaacatataacatgttaaataaccaaataaataaataaataaataaataaataaataaataaataaataaataaataaaacagataataaatatccacaaaaaaatgaaaaaaaattaaattcaccatgtaatcttttgtaatcttttaacatttgcatgcaaatttttgtgtcgtggtctgacatgaggtgttccactagtagtagagttagcagtgtttaaattagatgttgcatcactattattaccattggtattatctaaattctcaattatcgtgcctgccttgacatatatttgaatatctctatcatcaccatgcttaaaaagacatctcttaccatacggacaataacctaatttgtcccaattaatgcaaggttttgtcctaaaattgtttgatctttgtttaaatttcaattcatttagaccgtgtgcaaattgacatttattgccatatttacaaaaccctttagtggtaaaagactcacataattctgtcttatacaactgtttattgatctctgcttgttgttgttgttgttgttgcctcaaaggtggaggcattaccaccggtatattatataatggaatattttgttgctgtttttgcagttgttgtgacaggatttgtgatggataagaaacattgttagaaaatgtgtttgaaagaatattattattatgattatgatgttgaggattactattattgttattaatctggtttgaaaatatataataggaagatgtatttgggttataattaaggtaattatggttaatgtgattattagataaggatagcttttgtaaattttctgttgtcaatggcaaactatgattaaaactatgattgatatctacttctaataaatttcttcgatcaatgctattattattatgactattatcattattattaccatttaaatgattctgtataccataatatgatagctgataatcatttggtcttaaatttatctgattttgattgtttattattggggaagaatgataataattggaatataataaattattattattactattactattactattgttattatcattatcattggtatcgttatcatttgtgtcttcattcaacaatgattttaaataataatcttcaatttcttttatctttagtgcatattctattgaatcatcattagtattcttattagagaccgctgagcctatattattgttatatatggatgcataatggtcatcattgataaagttattagcactattaccattattattattattattattaatcaattgtgttatacaacttgaattatccatttcatgagtcgatgaatcccgaatgtatgcagttgttgttgcggtagtactagtactagtaatagcagtagccaatttggtagcagtagatttagttacacttgatgataatgatgacaaagaagatggttcaataatatttgtatcaaacaacactgcttgtaaaaatggttttgtgttggatccaccagcaacagttgtaaaaggagatgagtttgtgaccaggtgataatttttatgttcaagattagtgaaatcaatagatagcatatcataaaccaagtaaaaaaataaatatatgtagaagaagacaaatcagaaaaaaaacaacgacaacaacaacaacaacaacaacaaacaaataaataaaaagatataaaacaaaaagaagcaagtcaacttctaagattctagataagttataaagatgcgaataaaggtggagatgagctaataaataatttatctgttaatattatcttgtgcgattctctatttatttctatttttttttttttcgctactttttgcactttagaggacaactttcccaattaagaaaaagcacacagactcaaaagaagaattttttttttttgcacgttaagttcttgaggaatttctgtattctcaatatcgtgaaacaaatattatgtaagggagtaatatccacgtctgtatctcacattcatattagtagcagtagcaatactagttgattatagttgcaacgacattgttaagtatccatacatacgtatatatatacgaaaagggagaaggtaaactaaactgtcgacagtaataatttttttttatttctcttatagttgattgagggtctcttttgagtgttgttttgtttgttgcacagtgcaccctcttagtgagttaatttttaactgagacgatttccatagcaacactgcaccttccctctcacgtcattttctaccattctttttctcttttctttttttgttttctatttttttttttacaggtgcacttctaatagcctcagaaatcaactttacagcatcaactatccatacatagtttgtgtacaaatccctagttgcattctactaaaagtatgaaaaagaaaaaaaaatattgaattactatctggccaacacatgttccagataaattttctttgtagattaacagggcaggattgccacaattttaatcttatccacatccgtgtggttattgtggcagcaacagcaacagcaacaatatattagcatgtctcctattgatttgtaatatgctgttattattattattattattattattatttcttagtccatcttcttgacaccctatcttgtctttgtcttcggctccaacatgtggacataagtgcttacattacctagcagatttcagtcatcttttgaaatgacgcaaatctaagaaaagacacaataatcacaccccaacattaaaatagggttgcactttttttacccttctgattgacaaatttaagatagggttaacaaaataatttttgttttttcattttttttttgtagttcgatagttcgatggatttgaaatttgtcaagagcagaaaatttttgtaggaaaataaaacaatgtaataaaaacattcattatattaatgtattgattgtaaaaaaaaataaacagaaacaaaaattaaaagacaaaccaatttagaagcagtgatattcattatttcagattgtctgtctcaccacatttcaagaacactttttaacaattttaagaatcttggtaattttagtaagaattcataatcgtatatattataacatatatacaatcatataagatataacaaaccacagaaaaacagagcacatccactagtgttaccatgaattataaagaagaacaagatcaggaactggaagtccttcaatccatctatccagatgaattggcagtgttaaacagccattatccaaatatatccttcgaagtatcacttttattggagctagaccaattagatgacctaatcatcgaatcattgactaaaaaacacacccttttggtccaaataactttacctgaatcttatcctgacgagactccaatagtttcgatttcttgtcatgaagaatatgtaaacggagatgacgaagtagacgatgctgatgagggtgaagatgaacctgaattcgacagccatgggaacaaaataataagtaaactggaaaacataccaaattctatatcatttgacagtttcatacctattttacttaacgaaaggataaataacgatgaatatatggaggatgaaatgatggtgatgaaggggatgcaaatgtgtttcactctactttcttctataaaagaacaatgtgaaaactggtttttaaacgagttgaaagaaagagaattgaaacatcaaagagagattgagttgaaagaaaagaaggagaacgctaaatttataggtaccaaagttacaagggagtcttacttgaagtggagggaagattttagaaaaaaattaaaattagatgagagagatcaactaagaagattgaaggcacataatggtaaattgactggtaaacaaatgtttgaacaaggtcttgttggtactgaagatgaagagactggagatatcgatggtgaagatggtgatggtgatagcaacgacggtattaacacaaatatgaaggattctgttgctgatgcttcattatcaaataacattaaagatttaaagatttaaagatttttaaatcctaaagttctacaagaaaaaaaaaactaataaaacaaaagagaattttgtaacattacattacactatactacaacatgatgtaatacatatatatatatatattaataaactaagttattttatattagagatttagaattattaaataagtctgcaaataagtccttatcattcaaagaagtagttttattattattattattattattattattattattattattattagtggtaccaatgctgctgccattcaataaattatctagagttgttgatgcatttttagtgatagtagtagcagtgtttattgtcgtggtatttagttcactttggaaatcaccaaagccatcatcgtcatcgtcgtcgttgctattatcatccttagtatggtttccaacgtcactagaacggaatacattcaaattggtaatattggaagtaggtgtacctgctaaactattattattattattattgttgttgttgtcgtttgtgtttgtacttgttgttgttgttgttgttgaatcgaaatcaagatccaataaatctggaacatgttgttcttgttgtttttgatgttgtaatttcatttgttcacggttctttctttgttgttcagaagttttgattctttctcttaagatttctcttctctgtcttctttgttcttctaaacttataacttgattacgtctattatgtgtgctattattattattattattattattattattatgcattacatatgatgttgatgatgatgaagaagaggaggaagagggaaaagaagaaggggcattagatgtcgccactgctccaactgtgaattcattaaagtcgtcatcgaaatcatcatcaacatcaaacccttgtgctgtatccattacatggtcaccagaataggatggatgattatatctgttatgctgaccagccacgaccccagtcaagtcgttattaaaaccgcctgctgcattattatttttaatctttaataagttcttcttattcttcaacctttctctttccaaaaaatgtggatcgtccaaatattgtaagatcaattcgtttttcttttttataccacgctcatggacctccatcttcccatcatttgagaatttgattttaaagttggtaacttctcttgtcaaaatgtgtttgtgtgcattcaagcaactcttaatctggttcagttcgtcaccgtcgtcgacattcagtagaaggaattccaagacgacaagacatttcaacaccacacgccattcagacccatagttaacatattctttccttgccttctcataaagattctttggtctctgagcgatatggtcgatcaatcttttgagaatgtattcggtcattagatacatggggatctgatatctgtttctcaaaactttagaaagatgtttcggtgtgggaccccaggagtctgtgtttgtggctcttctaatatcgatctggtatggttcatactgcactataacgttttgagcgaatctggcagcgttacggatatcatggatacctaaattctgtagtttcttagataaagagtccatgttctgatagtaaaccacttctcttcaaatatcaagattgaaatcgaaaacaaaatcaaaaacaaggacaaaaaataaaaaaaaggatataaataaagaaataaattgacttatatgctatgaaattgaccgatgtagatagaggttagttaaggatccttatggtaaaaagatctaccaatgattctatttatctgtttagctggtgactatcagaagtaacagagaaagaagataaatcaaaaatacacacacacacacacacacacacacaagatacaaattgttttatcacattacagaaaatgaccctacgtaatgtctaagctaagccaagctaacatacatcctagcttctgtcttcccccttcctatgcatacaacggacatcaagaccatgaatgatagttgaaagtcccttgcactgaaaatcgactcttgctttccaaattcgcccaacacaacaaaaaaaaatctctgcgtcgttttctttgcgacttccaaacaaaaaaaaaaaagaaataaaaagaaaaagaaaaggaaaaaaaaagcaattatcggcttttccattttgatccgcggacatccgtacaccagattatgtgtatatgtgcgggtaaccacaatgggactctcaaagaaaaaaaaaaaaaaaacagaaaaaaacaaacaaaccctaaaacgcgaactgtccatccaaccattttccttcacttctttacacatcacacaaacacaaacacacacacgcatatatattctttgtatatatatatatgcaccaaaatattatattgatttagatatagtgttgagaataatatgtggtttctctacacaaatatatacatactgtgacgagttgttactattactttttttctgctttttttttctaatcgacaatgtcagccgtgttaacagttgtttcctttgtctgttcattattcgttgcatcacttttctctgattgataatcttgttttaattgctcaaaatctttttcatcttctaataacgccttaaccccaacaacttctgcttcatcgaataattctaacattttctcaccttcctcgtacgaatattcttcaaagacagcattcacattgtctaaattacctgtcttaatagcttcttgcatctttaatggaatcttagagaatgccttacaccttctaacctcatttggatcacttgaaccaaaatctggcaatgttatagccaattctgtagaatcgtccaacgatcttaactgtataatagcattagcttcttcatcccctgcttctccatccgcattttcttgctgaatgattttacaacgttctttaatatggttatatttggttttaacagaatctaaaaatgtgtctttacccctggtatcgacgccattgccaccaccattgattaatagcaccttgccaaaaaacattttgataactttctccatctcatcaacatttaaaaatgggatttttttcaactggtacaattcaataatatatgacatgatttccgcttgatgaacaatctgatacgtcatctttgtatcattagacaattcatattcaaacgctttcatcattaatgcatccttttgttgttcggataatatctccatatgtttcaataaaaaggattctgacttttcacattcatctgtcgaaatctttaggccaaactcttctgtcaagggatgtaatttaccaatattgtcctcacttgtaccgtagtcaataaattgcttgtacaacttaactatgtcattgtctagaattggatttgtcttagcagtgtcgttgttattactgatatcatttttgttgctcttattcatctccaaattcttcaaagtattttgcaaagtctttgcatcttcttcaacacttgatttattaataaaactactatcaaaaccaatgtggatgtcttctgaggagatatgctcattcttctccttgtacaattgagtcaatttctgcaacacttcttctgtgactttatctatcttttcacggtgtttcaaaaaatattttttaatcaactcgctatcgtttggatctaacccatctttcttaatatcatgtttcaattgatcaaacaaatcctccaccatctcgttataagttccaatatcaggatcaacattctccccaacacacttttcagatttatcaaagttagaatttaaaaatttggtgatccggtcaaggtcattgaattggtcaacaggcaataactggatcaatttatccacacgtttgttcaattgatggtacatcttcaactgggtttccaaattctttatatctctgtttctttcttctctcttttgatggatagattgttgtttccatctgataaatgaccgtttatccacatttggatggacttctatatctgaatcatcagacaattcaatcttatcccatttagaataatcaataggcatcactgtaatcttatttttttactttctctttctctctctctctccttctacaaataaataaataaataaataaatatatgtattagtgtgtgttagtgtgtgttcttatctcaccaaagactgcatgttgcatgtatataaacgatcttgtgtggtactttttctatgtgacaacatcttagggaggagaagggcaggaggagaaaaaaaaagataaaagaaggcagaaaaagaaaagaaaatggaaaaatttccatcagtgccctaattagcatctctcttctttttggaaaaaccagctagcattactcctcaaccctaacgactcatacatacattcatgcacattgtataacgtaactacacagaacgtagaggaaagagaatgaaacataataagatatgacacgatagaataagataaaatgaacaattttggtcgaataatatatacaaatatatatttgttcatgtatgtgtcgagtttatcgatagaaatctggacgtccaatgtttaatccatattcttctacggcactgcttagatcattgattgtcaacacaaccttcgactgtgtggtcttttcattttgttgctgctgttgctgtgtcaatggttgctgttgtccaggttgttgttggttcaacatcaattgcctagcccttgcttgtccattatttgcattgttaaccgctatccctgacctgatacgtgaatattcatacgcgtcattggctatatcacttacaaatttctgtgtcactaaacccaataaccttttcactcttatatcaacatcatcaaacccattctttctcatataatattcaattactgcatccggtattatgggcggattatctaccattaaatcaagtatttcttctaacgtcttatctttccttgtgaattctgggataccgaatatattatttagaccgtcatcaaccattaagttgttgttatctgtcccactcttaatagccgatcccattatttcaccttcttcctcatcattgaattcatcatctacctcaatatcatctttctctttctcatttgaattttcctcttcatatattttactctcttgtatctgatctttcatctcattcgtatcaagcttattgttattattattgacattatcaatattataagtgctagtaatgttattatcattcattattattctattattttcttgttcaatatccatcttgggtatatgggcgtatgggaagtatatgtatatattatatcaaaactacttgttggctctctcacctaattctataaacccttctcttaaccactttaatagaattatcctccccaaagaatatatatatatatctttgtctttgaaatatttgcaaagtaaagttttacttatgcttttattttttatttttatttctttgtttaattatcttttttttttttttgcttcacagtttatttttttttttcttttagaagaaactttggacattatatttgaaggatttgattaatcaaataataagtgattaaaaaaaaaaatcgattgttgtaaagtgaaacctattgctgatttaaacttgtacctactcactgaatcaacagggtgatcctgagtgctttgaaaaaacaaacaaacaagcaattctcaaatgacaagccatagtaataataatattgctgataatgacccttttggatatcttgaatcagatctacgaaagttctataatttaaaagatttaaatccaatgaactcatgggtcaatgattcaattcttcaatttgatttaaataaatattatagtaataatgacagtggtaatgtcattggtgatagcggtagtgacaataatgatgctgttgtccctaaaaatactggctactctatgattaatagtttagatatggagtctgttgattccaatttatatgaaattttaaaagatttagtagataaacaacaaataattaataaccatagtaacagtaacaataatggcatgatagatgataacgacatgcaaactggtcaatattttcaagatgttaaagatccattgaatcaaaaacatctattaaaagatttcataactaacaattctttaacacaagataataataataacaataatattcgttcgtacttaataaatcaaaagagttttgatgttaaaaaatttttgaaagatatccattcaaaggacactttccaagacttaacaaaatctttagatgatttgaatcttgatttacaatcgcaatcagtttatttacaaaatttggtcgaaaaaaattttattaaatatgtaaagatcaaaaatagattggattctatctataaacaattttatcaaaatacttcaacatcaggagtaaacaacaacagcaatactagtattggtaaaacaacattttcaactgctgataacccaacaaacaatcccatgaatattgacgtagaaaatttaaatgaaagggtcaaggaatctattagatccattaatttaaaattgaaacccttgatcgacacgaaaacaaaaattaacaactatagcttaacgaaacagtttattgaatacaataaagattattttaatttacctaaagatttaaataatttattgtattcaaatgactaccaaaattttattctacaatataataaaggtgtaagattatatgaagatttaaataatacatatgatttaattccattgaatgagaaaaactcagaccaaaaacaacgacagaccaaaatcattgaattaatttggaatcaagtagaaaatatccgtaactcttatagagatcaaatatggaataaactgattaattcttcaattaatgagtccaatgaatttataccattactttcaaaattattggatttaaaaatcgaatctaatccaataccggatttagttcatatctgtctaactaatattgaaaatgactttattcaaatcattaaaaaatcttttaagaaaattattgttgcacaaaaaaatattttaaatattaatgtcaatgatattgattcaaacaacagtaacaccaccaatgaacttcaatttgatgaaaatgatggcgttgacctttcatattacactttaattaatgagaatattataatatcaccttattcaagaacaaccacaacaacaagtattatggatggtgaaatttcaaattacgaacgatcacacaattctactgatttttttactttttctaacatctctaatctaggccattcttctagacaaaatttaaaagagtcttcaacaccaattttatctagtgttttaactgattcacctctagtcatcgagatgtggttgattattttgaaatatatcaacgatctaactgttacaataaacaaatttattgaatcatgggaaaatatagataaatttttaaataatacatatcaaagaatgttagctaatgataaaagaaaggacgatattttaattgaagataatgtaaaagctaaaaataatgactaccatcattataacaataaattaactaatggtgcatctcatcacaatggtacagaagtttcaattgatgaaatcgaggaatttttaaaattaacacaggaagagaaagatgaaattaaacacaaaggtgaaaaaataattaatcttttatgtaataatctattatcgtttttccagtcaacacaagagactttaccatctgtaaatatcaaaaatgatacaatcaccacagattttactaacaatcttaatgaagggactgacaataaccagtatggtgtaccctcaaactatggatttatccctccaagagccaatggactaagttgcctaagatatttacctctgatccttgaaccaatgttaaagagctttagtaatatagctcagttaaatatcgattcttcaataaattcatcaattaaacaattatccactataataattgaaagatgtattggtgcactctcttctacaaaattaagggatatatcgagattttatctgctagaagattggaaaataactacaaagattcaagaaatcatcgataaccgtaattcaagcaccactactactaataattattatgagaatgaaaaaagtgaaaagaactatgaatttggagtcacaggtcttcctgatattgttcttgggtttcaacaatttagtattcaaacagtaagagacattttatttgcatatgaaaggttacccactgtaaacaacatttgtattgttagtccaccaaccaaaaaaatgctaattgatgtagaaatacaacaaattatttcattagaagctgttctagaagcaattttgaagaatgcaacaaaggataaaaataacccaagaaatgttcatactttattaacattaacaaacttggaatatatcaaagaagttacattcccagagacgttaaattactttgatgatctatttgaatggaatcttaaagataaacctttagagatttttaatcttttagataaaatggagaaatcaatttttgggaattatatatctgatttgaagataaatttaaagaatattttagaaagcaaattccatcaaattgattggataaattatacatccaactcttttagagtcagcgattatattattgaaagtttaatgtttttgattactatccatagtgaatgttttaaagttggaccacaattaatcaacaagatattaaaggagactcaattgtttatctctaaataccttttcgaatcatttaaaccatatgttggtaagatttcatcagatggactactccaactttgtgtagatataacatttttccaagaagtattaggtaaattattggaacaagaaaccaaagtaacgttaaaggcttgtttacaaaattgtttccaaaaccatattgaaaaaatggataaatgtgttattgatatggaaccaattgttcagtcaaatctaaatagaacggagatacaatttgctgcttttaaatgattaatctatatatctatatatacatataatatgtaacaacaattccagactcaagagacaaaagtaaacaagtcctattaggaatagtgttcaccatgcttttttaaattgataatcgtgtaaagtggatgtatacctttaatacaatcaaccaatagattagaatcgtcatataacgtttttgtgataacattatctaattttgcagaaaaagattcatcgacaacgaatgaatcaattgaatcatcaaatttgattattttaacaaaatttttgtttccacactcatggttatctaaagagaccacaaaatgatcctcttcatcacttgatagagaaataatattagcaggcaattctaaagtctgttttaaggataggataccttcatttggatcgacatttaaaataaataaaagcttagtagcttccacatagaaggcaacgtacgacaaagtgcttaaggaggccaatttagcgacacaatattcaataatagagttctcctcgttttgaaatctgacttctgctaaatgagaatcagtcaaatgtagcttaatatcctttgcataattatatgtagatataagctttccagtctcccaattccataaaaagacacaatcatcaccacctgcacttaataaccattcggacctccaattgggtgatattatactactgataaattctttatgaccaaataaccaattgttgataacatatgtctttggataattgacaatttcgatatgctcatcacgatcggtaacaattacataatctttgccgttatgaatattatgcttcaataagatatcagttaacattgacacctgacccaatagtggtcttctttcgccttgaacttcttcattgtatggttcatcatttttaacatctatagaataaacatcgccaaatttatcagccactaaaagaatattttcatcattggtcaaagtaattgcatttggtctcttagcaaaagtttctctctttctaacagataaacaattctcatttgaattagaagataaattgacatctaatataacaatacccttatttgaatcggtacatgcaacaagtgatttccccttattaaaaatcttcaactttcttacattagcattcaatgaaaaagactcagatattgggacttctttatcaagttgtggtttagtaacagtagtagtactcgtagtagatgctactgattcaccagaattagttttaatctttttattcttgaagttaaccttttttgcttgttctgctagaaaattgtcaacccacttacctacttgcttatattcattatttatacaacggtataccactattgtgttcttgattacggtatagacttgtttgttggtactgtcaacaacaaaatcttgcactggatgaataaatcccatattaaaaacaaacctttttttatttttttttttcttcttctgtgcacctgctcctctaattctactccttaaacaatcacccgaccattcaagtattcacacaatataacatcctatttttttaccttgttttctcaatccaattgaacagcttagttcacatcggtcccacaacgtattgcatcgttgtaaacaaatttcaaacctttcaggtaaatctttcacttctcgtagtaaagaagactattaaaaaaaaaaaattttttcactatttcctgattgggaaaaagctttaaatttttaaaatatagtcaaaaagtttctttttatttttgttcctcctgtctcgtttaaagggaactttttttatattaacagtagcaacttaaatatgtagtatacatcagccgtcaaggctgttccaacggcttgaatgtcacccagtagtggtttgtatttcacttcaagtatatgtttttttttatttcatatttttttatctctagattcgttataaattagctaagttttcgaagtttactgagttattaattgctaatttactgctattactgaaagttattagatcgtttatttaaaaaaaaaaaaagagtattacttatcagtttcctatacagaatgtctaatttaatagaattgcaaaaaaattacgtactgaacatattagatgaaatccagacggttcataatatcaaatttttggtaattgacaaaacagtagaaactattttccaatatttgtttaaggattcccgtgaactgttaaatcatgtcactacagttgatcgaattgactctccaacaagaaagggacaaagtgatgtagaagtcatctatatggttcaagaaagtaaatttaatatgaattgtatggatgcagattttgccggtggtattaataaatataagagtgcctatgttagattcatagcatctccaggtgattatctagttaaatactttaatgatttgagatatttaccccaatatttaaatgatgttagagagatcaaaattgggtttataccaaaggaatctcaatttttccagactattgatattgataaacctttgcaaatattttataatcaaaattgtcatgatttgatcgagaaaaatttgaaaagaacacttgaatctttattaaacctttgtattattactggagaatatccgataattagatattcaaaagctacacagagtcagttagatgtaactccagcagcaaaattggcagagaagttggcgtttatgtttcaacaatatttagatgcatatgcaagggaacatgaagatttcccacctccttcaaatagaccacgtgccattatgctcatcactgacaggagcttggatccatttagcctatttatacatgattttgcatatcaacctatggtatatgacttatctgaacatcttgatctaaaaacgggagaatataaatatcaagcagaaaatgaattgggtgaaatggaagataaaagttctaaattgtgtgatttactagaccctgattggatagagctgagacatcagcatatagtcaatgctaatgagtacctaggtgggaaaattaaagaaatgatagcccgaaatccgttgcttgttgatagatctaaaattaaaaacacatcagatctattaagtgtagtggcacatttaaaagatttcgatgaggaaagaagaagaatgattcttcacaaaactttaattgaagaatgtttaatgattaaccatgaaagatctttagcagatctatcagatttagaacaaactttagcatcttttggtatagacatggatggacaaaaagtgaagcatataacagatcaatttttggaacttttattaaacaagaaagctaataaatttgataaaattagatacattttgatatattcactttatcgtggtggtataattgaacaagatttaatcaaattactaaattttactgggatcagtaacgaagatgaaatgtttaatcgcgtgattaatatttttaaaaatttctctcatctagcatttaaattaattaaaaataatactggtgataagccctttgacaaagaatggttccatgatagtattgtcaaagatcccaccattttcaattcttccagatttattcctgccacaggtagtatattatccaaggtcatcactaacccgttattattaaacgaggaattttttccctttgttaaagataaaccaatcgaattattaaatgaagacgagatagaaatttttagtcaaactgcaagagtccaaagttcaacgtcgttaagaaatcaaagacataaagcatcatggacgaaatctggtgtaactttaccaattaaagaaaacagacagaggtttttctattattgcattggtggaattacgttcactgaaattaaatcagcttatgatcaatcaaatttaaaagataaagatgtttttattggtagtgatggagttttgacaccattagctgccatggcaagcattgaatatctaacaaaaccacgtggttttttcaaattcaatgatgataaaaaggaggatgctactgtaccagattatttgttaaaggaattgaatcctgtatctcaacctatttcacatattcattatcaaagcaagaatgcaccaactaggactcaagtatccactgcacaaaataaaccacaacctacaacaaccacccctgatgataacgatagtaaaaagaagaaaaaaaataaattcactagatttttgaagagagacaaaaagtaaaaggataaaataagaaaaatatattaataatggtttcatctacttcctcttgcccaataagtatatatatgtaactatatatggttgtttttatacctgttcataacacagggatttatagtaatgactctaacgataagattaaattaatgttgagattaatttttatagctattcaagacgctgtttgatatatatatatatatatatttaatcataataagtgtatcccaatgaacttaaacagactacactctgaatatggaaaaaacacaattaataaattgttaatagcgaaacaatataaaatcctatgattaagttatcaaacagttcactatgacgcttttgtattggaaacaaaagaagttagtatcaatacaaacatcatcaacttaatcaaaatacgatttattagaaatatcaaatatggtaaggatagaataatcacttcacaaatttcttcataaattctttatgataaacagattgtgtaatattgttcacataagttttactcgtatttaaattattggtggatgattggtttgattttttagagactttatttttatctctagaaaaggtcgtgccttgtcgccatgatttctttttaatttgtgatatgggtactttaacgtccttgatatcatcttccagacactgttcttccttcttctcctttgccaaccttttttgtttaaggagagctagttcctcttgtaattgttctatttccttttcatcttcctcatcatcatcactataattaatatcactactactattattactcttatctgaaatatcttgagtgtctttatcttcaatcgaaagaactttctttaactcttgtaactctgtattttctaagtagttcttctctaaaactatagacccaacattgtccttaatattcttgttaatattacactttgcttcatctttactcttaccagctatttggtctctatattttattttcttgtgaccaggaagtaacctagcatgttcagttgaagttggtacatatctcgagacttttgcaccacttctagcctctaactgtggtctatgagatgttgtcattaatctactactatcaaaaaactaccttatttatttatttatttattcgtttatctacccatgtagtttagatattgtctacatctattagtgctgaataagtgtactcttatcgtctcctggattgcataatgatatgaactgtgttactgtgctatttggatatagagatggatgaatagtacacaatagtctatatttagaatatatttaaaatctaaaaataaaaaaaaattttttctttttacattgaagacctttattattgatacagacaataattggcaagcaaataagtgtgtatttgactaaaaatacttagtggcttttcctaaacagaggttggcttggtttaaagagtgctggcagataaggagaagtaaaagtgagaacaatcaaaatttggttatatcgtttcttttcattctacaaaaggaacattttaataaaatagtacactatattacactataaaacaaaaagatagtatattattgctgaaccattatatgtcccattaatatgattgatagtaatagtataaaccaaaatttaaataatactactgttcttgaacgattgaaaaattctaataatgatgatgtgatgaaggttgtcgagagtagtcaaacactaaatgatgaaaatggccataagaaccatcaagagcaagaagaacaagaccaagtagaagaagatattgataatatttctactgtaggttatatatcagtgaaagattttgcatatgatgaatcaaatccattacattatggttattttgaagatgaacaagattttgaaaatgagcattcaaataataatgacgacagtaatagtaataatattcatacattaaatggtagtataataacaacagaagttatagagaatcataatgtaaatgaggagtatgataacggtttttctcagagacctcagagtttaatgatcccagatgattatataataaatcaaaaggcgatagctttatatgactttgaaccagaaaacaataatgaattagaactgaaagaaggagatatagttttcattaattatagacatggtcagggttggttagtagctgaaaatttagcaaagactaaaactggatttgtacctgaggaatttgtgtcgtttctagattcaaatcaatcttccaatgataatcaagaagagactaaccataaggttactgacattgataacagtactgaagacataccaagaccgttttatttaactgaacttatatcaaaaaatttacagcctgacaagacaaatgatgaagacacatctaccactattaataataaaacaactcaatccgatgatgaatgggaagatattcaagatgatttcgatgaaaaattaacaatatcagaagaacgaaaactataatacatatgttaaatcccttatatatctacatatattattatattgcattagcatttgttaattaaatacaaaaaaatatcttttattatagacatttttacataaaacgttaagcaatattatctatgtttgcgtatttctgtaaaggttacccatataattgaaagtacatatactctatttgttatttttgactgataaaatatatatgatttatatatcttcattatcatctgataattcatcaaaatcaacatcatcttcaacttcttctaaaaactcgccctttcttagtttttgcaactcagaatcaggtataggcccacccaattcctgtaataatgcatgagttccatcaattaattcttttgatatgtcatctgatggatcgacattttcccctaatttagatgcaaagcttaatgcaattctagattcatttatattgtctaaaacatcttgatcgtttagatctattggtacctcctgtatatgtgaattgaattcataaatagtttctggaattaacgaaatatttggattactctttttaaaagtctccaatttacaaattaaatagtttgtgaaaccttctaaataatatgcttccaaattgtcttcatctatttccttaactaaggcttccacttttaatgcaatctcgtataaaccaacctccatacacattttagccagcgatattaaaggttgtaaaagatttacataatcttcatgtgatgcattattactagcactcccactattgctattattattcataatatcttcagcgattgacttctttttaatttcaaaatatttccaggcttgagtgaaagctttgcttgcatcactaaacctttgttgagatattctaatagaaccaagtgtggaccatgcttctggtgatttattttcagagatctccattgctttagtaatcaattcctcacattgagattctgcatttggttccatacaaagatcagtcatccagatctcaatcatcgtcaacagaccattaacaatcttatcaacctgatcttgattaatgttttctccattatgtgtttgtgaaatgttttcgataccttgacttaggatagagatcccatcttgaccacctataatttgtcctaaggtgaaaaatttatcacatccgccaatggtcccttttgaatcaagttcacaactttttaccaaaagtgggtaagccttatccaactgaccattctctaaatatgaatcagcaaaaatctgtaataatggtaaattggacgaattttcagccgttaatgattttttgtatggttttaaaagttttaatgcctttctggaattattttcagaaattgcttttctagcttcatttattgcttgttcaatattattcataatgacgacagattttactaactttctattgtatattattctgtttcctttttttcccaaacaaaaaaaattacaaagtaaaggtaaaatagaaaactaaaacaaagaccaactgatcagttgatgaggtttttcgttaacggtttaactatatgttaatcctttatactgctcttggtctactcgttacctttggaattgataatcatatcacatctcatcttagatcatctcatctcttttaaatctgcttgatttatttttcaatttacctttggcgcagacaaagaaaaaaagtaaaacatgtttttcgtgtgaagtgacagatatcttgtaaatacaagtcatacacattgagtctattctcaattctagtgttatcacaatgatggatggttaggagtatcctattgttaagagataatatatataaaccgtgcaattttaagaggtgtatatgtacacttataatagtatcatgaccagaattccaatactcttttccaaaggggtatattatactgtctatgttctgaccaaatcattctatccatttcgcgacgtccggtatccatatctagtctatccaatctttgtatttttgaagtgccgacaatcttatatccaatgtaacagcaagtaaatatcattagccccccgtaagcagagaagaatgatctaacattccaaaaccctgtaatgaaattgctaaatcccatgaaaataacgaataatgaacaaccaattaacccatatattgccaaaaagggttgaaatggagatttaaatggataactcctgtcatctctcgataaaaaatcacaccttcgtcttaaagcgtaataaaatctcaaaaatgatgcattcaaaccaaaccatataatcgacgtgcttgcacttgacatgttaactaaaatatcaaaattgttttgtgaactttcgttcaccgctaaatatgcaatcaaactaaataacccagctgctattactgacacataaggtactccatttttactgcatatttgaaaaatgtacggggccttcctttgtattgacattgaatataatgctcttgatgaattgtacaatgatgcgatagaagcacttgatgtaaaaactattaaaatagcattaaaagcagctgaaaatgtacagaggccataactttgaagtgcaagtacccaaggagaagaatactctacagaagaacctggaatcttcgttctgactttacatctatcatctatttgccattgtgtcccaattccaaggtctgctgccttagatctcttacctctactagaggtatcataagataatagtcgtgggtcgccactgtagatattgatcccaactgttaaaatagaaagaataaaaatagtcaaaattatggaaaatgttctcttaatcgatgatggaattgtctttcttggatttttaacttctccactggccagaaaagtcatttccacaccactgtatgcaaatgtagaggttaaaactactgataataaagccaaaaacctacctgtagataccccaataccattcgtagacccagtacctgcatccattaaatcaaaagtgggtctaaataatccatatgtcataccgccaactgactttgaagaatcccaaaatctaaaacctactcgactatgactagcacctccatacccagaattcagtattatcataacaaacatcataatcaccgatattaaaatcttaatactaccaaaaaagaaaataacttcgcccataagattaacacgcaagagattacataatatcgggtatattataaatagtgtaacaaagccagcaatcgtccccctcgttaaattaacgttagaaaaggaggtcaaataaaacgtgcttgatgcagcttctgcaggaaacgatattatacatgaaaacacataagtccaaccaattgcaaagccaaaggcgtcttctacaaatcttgatgctaacccagagaatccagaagaaacaggaattaaagctgataattctgtaaaggataataatgtagctaatatgacactcccagttaatatgaaccctagtaatgtaccaaacgggcctgcaatgctaaaggcttctcctgatgttaaaaaaaatcctacacttaaacatggtccaaccgaaagcatttgaatatgtctaactgtcattcttctttggatgtgataatgattgtcctttgagagaaaatcccttataaattgtttccaagtgttacaggtatgatttgaagtcacatcaatagaggactctaatagaagcgtctccctagtcttgtgtcttgttacaataagattattttcatcaattactaaatttctgtaactagtttcatcaatattatgagtagtgggtagtgaagaaatgctatccttgatgctatgcaatgaaacatcattttttatagatttagacaaagttggtttaggtaggacactatagagataatgagttagtgattttgattttttctgatatgtattattagtagccaaatatgtgttttcaagcatatcttcactatagatttgaataccactgagatcttttggacgtaaaattttcccaatcttttctcttaatacatactcttgttgcacctttttatcataaaaagtaaagtcatcatcaaggctactgggatcaaaagctgtttctgttgcaaattcgctattatgtcttaaatagtgttcaaataagtaaaacctgtcatttcggatatcgtcataaaacgactcaacatcatgccatccttcttgttgtataatagcattgataactgatgattctatactattacttgtaatattatcacttgcatcatctggtattgaagttctgatattgttacatttagagttctttatattgttattattttcatttgtgttattatggttgttgtcttcggaagatccccagtgaatttggatatcatgatatgaaaaattacttttattaggaaataattcatttgatgagttagacaggcccatgaacttgtcttggatgttgtcacaggtttttaataattgtcaaatgttaatgtgcttattggataacaaccataatgatgttttcacttaaggaatctacaatcactaaaaataaaaaaaattttgaggtcccttcaaaaattaattattgaaattttagctgagttatataaaatcataaaaaaaaaaagttggaagaaagtttattcagaagtatcattatattaagtagtattattaatgtacacaagatatctagtacttatcctttactttccaattatggactatactgaagttacttataattgttgttgaacttgttaagatatattaacaatgtcaagatgaagaagaaaatcgtggatttatcatcaattgtatttattatgcaatacattttgtatgatatttattttcacactaagtcatttaattttcaatatttatttactaaaatgatacttactatgtatttgaatggactttctttctaactgtttctataatatttttcagttcctgaattgtatgtgatccttccgctgataatatggattgatccatgggtttaacaattgactgaataggagtttgaaatatcggaggatttctttcatcaaagccgaacaaacttgttgtcctgtgatttgtattataattaccactgttactgttccatgaaactatgggtgtttgatggacaaccattgagccatttgggaaataggtgccttgacatggtgtggtgggaggaataggaggatgctgctttctttgtactttggttactaggtgagacggaatagctggagtagaaagtaactcatcactttttgtcattggtgtcttaaatttaggattttgttttgatgcagataataaaacaggtaattttgttttgtatagttttggagatgccataatatgtgactgtaagtgggcatatgtgtttttcatatcttgttgcttcttatacttatcctcctctatcttacgaattctcttcattttctcatcaatagtaactagcgtagatatgggtgtcttacacacttgtgatccagtaagtgatcttcttttgtaaagtttttgtttatacctaccgcgttctgtcaattgacacttgaaatctctggccattctctttaatccttcttccaaggatttttgaggagaattgcttgttactttaataaatccaatattcaacaacacatcattgaagcttttttcaatcctgtttaacttaagaaaacgggcaattttacttggggatatcacggtttccatcgaatcccaatatacgattaatagattgaagcagatctctgacctagcagaaatattagaaattaatttaattaattcttcaccgtctttctgtaatttcaactctaagtcaaaaatatcatcacatgttacaccagtattgaaaattattaattgggtatgatcaagttctacaggatcaaaattcttatctatacatttcacattaagcctaaatttgttctcctccattgatatcactttcttttgatcatttaatccgaatttagttaatagccatttatttgatattgaggtccagttattggaataaagtaggatatcaatttcaatattcaatgagggtatcactttgttgttaactttttcaaaatataactccttcatattaaagggtttccaaatatcctcgcgttgttcaagctgagttgaaaaattgttaacttcattacatgtaggtgaaaagatcaaatctgttttcttgtcagaagacaataaaaatgatgtatttgatgaagttattggagttccaaaatttaatctagatcgtattatttggggtacacctagttgtttttggacattttgcaaatcctctttgtgttttttctttatatatctttgattttgcttatctttatagttaattttccatttagacaaaaagttagatttcattgttctttcagagaatacagtcgcttgtgaatcgagaaaggtgtagtatatgttttcgtgaagaaatgcgttgaataatgaattagctaggtaatttattattttatttctactttgtttggttttttctattttagtaacagtatcttggacaactgttgcaattgtagatttaattaatgcatttgttaacctgtctgctaatttatcttttattacttccttttcctgttttttattaatttgtggtattgtttgcgattttgattgttttaatggcgttttaccatcagtaaatatattagttacagtattgttgaacgttaaatttctctgtgataatgttatatttgatacattcttatcaatactattaagtgatgacatttgctttgatgaatttgttggtacaacatgaaaatttcccgttcttatttcactgatattattctggttaatattaaatgcttgggttggagtagcagtagcagtagtcgataaagaagtgtcacgtgaaggtaaaatttgagtagatgattttatattaaatacatgatctttcttttctgaaaattggacaggtttattatccactgcaaaagaagttgtttgaaaactaggaagtagtttaggatcgactgaaaatgagggttgatatattaaatgtctaatagaattgtcaatacgactagcattcaaagcattagaatcacggcttgtaatattttcatttgattttccacagtttattaattgtgcatatgttctatcaccaatcttattatcaatacacattaaatatgtttgagataatggttttttctctgcaagatggtgtgaatgataagataatgtttttaaatctactgcatctgatgagatagatatggaataatattgacaaaatgattctagctcttctttattgttaaacaataaagtatctaaaaaatatttaatgggtatgggtttatgttttttatttagcgacagggataaagctttcatagaataaaatctcacttcacctaaatatatttgtaagaaagaccccataagaaatggaacttcagtagactgtaacaactgaaagaattgcaaataaaaattgagcgaattctctgtcttgatatatcctctttcagaataatttgaattagaaataatttgtctaaaacatatggctaattggactagatgatcattgaatatatgtgagggtagtgtctgtatgatctgatcatattgtggatctcgtattttacttaacaaaccatatgctctaaattctgcttcattaggacactcaaacccatttgctctcatatcgtcgtaaatttcggataatgtaatcaatgctttatgtagttgttctaactcctgttgaatagaaaattctatttttgttttaatcataatatgcaaaattaacagatgaattcttacaatcctttcattacaatcaacagcttcaggaccagaatagttttgatatgtaaaatcttgtctaattgatctcattctatcccataaaaaactttcactcttgggtaacgtagttaaaaggttgtcaacgatgtaatctaaagtcttaactaggatatgtggcggcctgacatcggaaggcagaggtggggctgctgccgctgcaggtctagcaaacactttcaaagctttattccttgaagccttcttgttttcaccaggttctctttcgtatgaaaacacagttagttccacatttcttctagctctttcgaatacagggcacatatcctcacaagtcccttggaaaacaatagcttcgttcagctcttttgcaaaatctgctttatctacaagacctttccgctccatcatctttctctctatgtctctcatttttttcaaagtctcatataattcagtggtatcttcaatggtattttctaaattgatcatttttctttgattcaatttgtcccaatgatcttgaacaaacttcctctttgtcaattgaggctgctgtgtacacaggaatttaggtatttgcctccttttatgagtcaatcgtttgaaaccaagagattcaggatttgagatcaatgaaccgatctgtttttgcggatttggtatcattatagcctgattaatactgtcatcttttctatgtgattggttattgaattcatcattactgctaataccactattattatcaccactaatattactagtgttattactaaacggatttttatttttaggtatcataaattttttgttttcattagatacaaaataattagtaatatttttagtctgagaaagattatccatgaattggaatgggatattttgaactatggacgattcaactggagaatatataatttttaagtgataatactgtcttgcttcgtgtattcgttattactagtttatttttaatcaaataaacttaagtaaaatgatacaaagtgggaaaaaaagaatgactgaataagctaagcacctttggcaagctaactgctggctgtggtacaaatggttcttgatcaataatagctgtaaattttttgaacattctcctgattattattatttcttttcttttattatttttgagttctgtttttttgtatattcttaatttgaaatttatgttggaagccctaactttcagagtccagggtaaaaaatagggttcaaaagtttgagaatgactataagaacttatatatatatatagaaagatacaagagataacacaagatggttagaaagattagttatattgttaaaaaaaagcattacgtatatatttaaattgttaaaagatattacaacagtgatataggtaaacttaattaattagataattagttagttagttagttagttagttcattagctagtttgtttgttacctaaagaataggtaaattagacataaatagtattagtttaaaaaattttaaaacaacaacaataaaagtgaaacaaaacgagtctctatctttgtatcttttgcttttcttgttgtaacgattagattaagtttctggcagctaatatttcagcgatcaaaacacctgaaccagcagcaccaatgatagtgttatgagataaaacaaccattttgaaatctagtagcggatcttctctgattctaccaacagatacaccgtatccagcgtctctgtttctgtctaatctaggttgcggtctgtcattttgttccagaacatgaatagtctgtcttggtgcagaatgacaacctaatttgtaagcgtcacagatgtaatttcttaagacctttttaacttgttccacagatggagctggtctgttcttaaatcttaaagagatgcattcagtgtgaccatcagaaacggctactctgttacattgggcagagactttcatttcatcagaagtcaataattgaacatgagtcttatcatcagataatttacccaaaatcttcttagtttcccattccattttatcttcttcaccaccaatgtatgggatgatgttatctaagatgtcgatacctggaacacctggagagaaaccagcaccagaaatggcttgtaaagtggtggtagttaaagcatcgattggaccaaaagcatcgactaaaggtttcaaaggagctacaagacccgcagtggaacaattggaaatacagacaataaaccctggtcttggttttccttccttcttggcggtttcaatcttattggccacgatatctaaatgttcaggattgacaattggaacgactaaaggaacatcgtcttctcttctatagtttttagcattggagacaacagctaaaccggcttctttaaattctttttcaattgggcctgcataatcagcatcaagaccagaaaagacgatatcacagtctttgaatgcttctgctttacattcactaacaattatatcttgtacagactcgggcattaaatcagtttgtttccaagtggtggcatccacatatttcttgccggcagatcttgacgaagcaccaagaacttttagttcaaaagttggatggttagctaataataaaataaaacgttgaccaacagaacctgtggcaccaagaacaccagcaattttttttccagccattttttttgcaaaatgatatgatatggtatagatcaaaccaaaaataaataaatagctaagttaaataaaaaattgttacacaaagcgttttgagagctattaggaagggttaaacaggaatagagtataataggaaaaagaaaagcaggctaacacagggaaccagtgcttttggagccgacgcacgtatatgtaattggtacacatatgaataactatatgtatttcaaaccacacaagagattatatataaacttcgatttggtgtaggtaccacatgtctttgagtcaaagcagaagaaacagaaaaggaaaaagaaaaaagataaagaaagccagagacaccgaaaccggcaccacagacaataggagaatgagaaaaaagaacaaagagtttgagaaaagaaattacccgaaggggaaactcgaagaaatgactaattatgatacttgaatctaggttattttgagtttactatatttaatttgactaatatcaattcaatttatttaaatcgtatatatatgaagaatagttcgacctgacaattgcttttaaatgttagcctaagtttgattatctgctagaatgatgagtaatttgtttaaatcatacattattatacaactatgctaaagattaaagaaaggaataatatatacatatacatatatatatatatatatatgagtgtgtgtgtgtgtgtgtgtgtgtgtagatgtgtatgcatctactgtaactaataagcaaatgttttcttggtaccgccagtagcacttttacttattttatcttctttttcttgttcggtattctcactgtcagcctttttattatgagtatcgtttattttaatactagaaagggtagcagattgtggtggtaaacctttgaaatctctttgaattcttttcaattgggataaagaactcgtcaaattggtatctatattaagtatgatatcagatgcaccaccagtagtagctatttggcttccttgtaaattattcttgctattaccattgctgttgtctatagtagttgcattgctattactatctacaaaatcctcttttgaagtaataaaatcatctaaaaacctcaatatttcatcttttgatacatgctgtggtttaccaattttgtgaataacaactggtttatttaacgtagacacataattccctcttcttgatcctttcaacattgttaagtatatataaatctatatttgtgtgggtaggtgatggagatacttaaacacgaatatgaatgcagactatataatgcagctgtttactgtattgtaccttttcactctattttattatacatatatcttcataattttcaaatgtactttcatacatttacaagaataaaagacataaaagataaagcaaaaaaaattttctttttgtttcctatctcatcgattaaaaaaaaaaaatttaaaaacaagaaaaaaaaataataataaaaaaaaaaaaaaaaagatagaaaaatatatagctagggttgatgcgtatcataagttagggcttatctatagttaaagcattcaatgtcctatgtgtttaaataatggattccttgataattctcattatttgcactatataattattagacattagcgtattaagatgacactagatacacatttattggtattaaaattaaagataaactgtttgtaagtatataaaaaaaaaatcttttgaattcctactatttatttgtgtgttctcatttctatctttattaatgacatatagttagagatcagaagcacttgaagtgcaagtaaacaaaaattggagaaaatataagaaaacaccacccaaagttactatttatttattagttttgtttttaatgctaaaaaattatttagtgagtccattttattaaactattttagactctagatcaatatacttacaatattcaaattgtagaaatattgtactgtctctgagactttaataggtgaggtaattgttacctattaaagtgaccaagaagtgtcatgaaaagtagtacaaatctaacaagttagccagagacaataggaaacttaatttaacgatctacaatcgataaacaacaccgataaggaagtttcgagttgacttgataacgtgttagctaatatgggagtccttttggaagtgttttgttttgtcgcgttagtgtgaattggtaagataattatttaaattcatatatatatgtggtggaactggtgttgccataattgacaaggttcactgataaagaaagtatctcccagtattcatagtgttcttttccctttgatctaattccattcgattcattgcaccaaaatgagaactacaaagacaacctttatttaccttctaagtgtattttttgtgtaattaaccctcatatattgtgtatagagggaagaaaggggagatgttaggatttaggctcctattttttcctcccttttcctttttttttttgttttttgctctcgtctttgtttgtttttcttttgttttctctttctttcctactatggaaataaatctctagaaggggaggcggaggcaacaaaaaaaaaaagagagagaagccccggttttcttttcttttttttttccttcttcgtggttttttttggtgttggttcttttttgtttgttcttctcgtttctgttcgtttcctttttcgtttcttttttttgctcctctcctttttccgttttcaacaagaattatgtaatgtttctttccattgctatatatatatgagtaaggggaggcggtggtcacacacacacacatacatatatacatacggtatatatatacacatatatatatatatatatgtataaatgtgtgtgtatgtatatgtgtacgtgtatatcatgcgcagtcgttagcttgttctgtttcttgtgtaatccttttgcgttggtcgtgtcttctaatttccgttatatatcccaaaacccacaccaagatttcaataataattaattgaaacgaataaacaaacaacaataaataaataaataaataaataaaagatgtctaaagtttacttcgacgttgaagctgatggccaagccttaggtagaatcactttccaattatacaacgatgttgtcccaaagactgctgaaaacttcagagccttatgtaccggtgaaaagggtttcggttacgccggtgctccattccaccgtgtcattccagacttcatgttacaaggtggagacttcaccaacggtaacggtaccggtggtaagtccatctacggtgctaaattcccagatgaaaacttcgctaagaaacatgaaagaccaggtcttttatctatggccaacgctggtccaaacaccaacggttctcaattcttcattaccactgttccatgtccatggttagatggtaagcacgttgtcttcggtgaagtcgttgatggttacgacgtcgttaagaagatcgaaagtttaggttctccatctggtgctactagagctagaattattattgctaaatctggtgaattataaacagacaaatacataagtaaataaataattaaaataaatatacatattttcttttttattccagtttaataataataatattaatattaataacaatattaaaaatttaacatttttttgttcatttatatatatgtattgaaagggtttggagaggggtggaaggggggaagggggtgaagatgagtaggggagtaattagggttataaataattctgtgattataattctatttgttgcaagttatgtaagttagttatacagttatgattgtttactttttctgtcttctcctaactcagtttctgtatcggaatacaatgatattgtatccattttattgtaattcattattattttaataatgagggtatcgttgatagcatttgagagaatgggtatttagtacatatttcaagttggactccacttaataccgtgtatttgtcgttgtttcaatccagcaaacttataagaatgattttcgtagagtttatagagacaagttatcgataacattttctaataaacatctaattctataactcatgcgtactattatatacgttgcgtaacatacaaaatcatacatatagagtaataaaatatatatatatatatatatatatattaatttctttgatgtgttgtgtattgagtcattacactcgtttttgctgtactctggaatcacagtagtcgatggattttcaaatagttagttttgtatttttgcttagaaacgtaatagaatcaagaagttttaaaagagatcaatttttaacactttttacattttgagcacttgtatttttaatttttctaaaaatgttaatgatttcgtagatttaaataattgagtataaagttttatgaatacatacatacatatatatatacaaatgtaaaacaatatttttcttaattaaactattgatatcaagaaagaatccaaaatgaaccatgatttttttttgttccagttgtatctttatatcattgaatgaatttaaagtggacacatttaacatgaatatttatggataaatacaatagaatgtcttaaataaaataaaataaattagatatgtaaatacttatgcacgaaaacaatatggccctccagccacattatataaattttaccattgcaaaaaattcataacagtttccctctttctctctctctttttttttattttatttttatttttttttgtttttttagtattgtccttattgaatctagatagttttcttaaaattagcaatttatacattgtacaaacatattaaattcaagcaatgtataagaatatttaaaaataaacaagaaaaaccatattatatctaataaaaggagagaaggatgtgtgtgaacctaatacacttatatctacctgcctacatatatgtgcatatatatatggagagagagagacagttatacgaaaaaatatcaatatttgcctagttatagcaattctaatccattacatatacattctaaaataaaagactctattgaagaagatgagaaggaaatggagacaaaacaaaaaaaaaaaaagagtttcggagtttttgccattcgcccgccccttcctcggcattttccgagacaaaaatgtacggtcacgtgaacaggtgccgaatgtttcagaacggttctggtctcctggtttcggcccacgcagaaaacatttctttctctctatttctttttctttttttttttttttttttttttaattttttccccttctgtcacgacgactttttgtttacgtgtatccgatggcctctctatggcagaaatatattgtgggcttaattaaagccaaacggtttaatgagacctgattagattttacacggaggaagccctgtgccttgcaatggcaaaaggaacacatctctctctttacacaagcctagtgctaccgttctcccttttgtctatacatcctttcttagaagggagaggagacgaaagagaggaagggggcaggggacaaaaaagcatagttaatgcttgtcactcaacatttctactgtaataacgtgtaagaatccagtcctttcgattctatgacctaactgtttcttgttctgaaacctggctaataaaccatcaaccacaatatcccctcaccttctgtttcaattgtatatagttcgtaaatagcaatcttaattctctgttcactccagtgtcactcatgacttcctaagtatgccattaccaaaatcatcgatgtagcagcactttgtgcatatttgaaatttttttttcttttgcttgtttttttttctttttgctctcttcagctgacttcaatgtaaaaaaaaaaaaaagaagaaaaaaattaaaatcaaaattgaaaactaaaactactttcttcttttcatctctgttttgtggtgaattgccattcatttatatacacttttaaccttctctgtattcatcttaagcactattctgttcattcactaaccaattacaattcatttttgtcttcaattaagctactttttagttcatcttatttttgctttcctcctatgcattttctttaaaaggtacatatatttacttcaattcctctctctctcttttgaactcttcttgtttataacaaatataaccaacacatacacaacacatacatacacttaagcatcatgtccaacccatttgatttgttaggtaacgacgtcgaagacccaaaccaagtcgttgttccaccaaaggaaattgtcaaggctaccacctcttccaagaagaaggatgtcccaccaccatctgctaatccagctagagctaacaagaacagatctaagccaactggtaacgaaggtgccatcagaaacagggacaacggtagaagatctaacaagtccagagaagtctctgcttctgctacttccaagagagacaactccagaagacaaaccgaccgtcactctagaaccggtaagactgactccggtaagaagattagacaaggttggggcgatgacaagaaggaattggaagctgaagaagctggtgaagctgatgctgaagctgaaatcgaagccgatgctgaagaagccactaacggtgtcaaacaaatgtccttagacgactacttaaagtccactcaagatgcttctcacttaaacaaggtcgtcgaaattaaaccagtcgaacaaatcgaaggtactgaattattcgtcaaggaagaagaagaatacgttccagctaccaaggtcaagactttgaaatctaagcaattgaagaccaagaaattcttagaattcgatgctaccttccaagatactcaaagaccaaagagatccttcgacagaaagaacaaccgtcgtggtggtaagggtccaagaaagaacaacaagaacaccaatggttatgctgttcaaagagacaactccatcgacaccagtaacttaccatctttagcttaagttcaatgaatgccacgaaaagattattttctttttcttattcttttttttaaaaatatagacaaaagataattttttgggatggaacttctcccttatgtttgctgtatgtcaattcgattttttgaactaaatcttggaattgattcagtttaaattgaggggggaaatcaacatctctatttggtggcggactgtgtatgattttgtttagtttattttgttaaatataaatttaatttttcttttaaattttatatgttattttaatatcaatttatattttgattcaggatttcatataaatatatacatatgcttatacatgatgtacacatatatcttactctatgactgtatgcaactgtgaatttttatatgagtggcttgtacggggttagtaggatgtatcctttcacatgcaacaatacaaactgatagataacaagtttcaaatctattagatgagtcaaacttttatagaacttttatagaagaagaggtaaataaatactattattgtaatattgaatctatcgacatatcttatacacgtaattcaactttataaacaaaatacaatattgaatagtatcaaaaaaaataattaaaagacaattcatttgaatatgtttaccttctattgaggtaaaaaatattacaaaataaattcgctaagtagtactttgcatagccctaatagatattataacgaatttactaattttgatttctaaataatttattttatatattttgttcgcctaatcaataccaataatcaatatgataattaatgcaaaatattgtcagtaatatagtaaaactaatgagacctttaagtagtgagttaatttgtagttcagttaaagtaccacaaaaaaatagtaagcttaaaaactcaaatacattactaatacaatctataacgcccataaaaaagtttaaaacaagttaaccatcagacatcttatctatatatatatgtgtgtctataaaacataccctccatccatgagattgatactaccacaataccgtataatacatctaacgttgtagatctaaaaaaaattaaggtcaaagatagacaagccaccttaaacaatatttcataataaaaggtcctgcataccaaatggatctcgacagaaatcgaagttatggtaaatatactactaatatagtcttcttttgaaccaatagcttcagaaaatgttaaaggaacaagttatattgaactcaaccagactgtattttaatagctgtactatattttattattattattccattcagtgttacctggactaaaaaacatatacactgaaccacgataaattttaaaggatgtattaccacctctttccctaatatttctattaattgaatgttttaggaaaagttctatataatcaaattgaaaactttgatgactttattcattgttttcgttgaaggccctgatgtttaaaatacctttggaaacataatcactatttagtgcattactattgatactattcatctcatgttcaatactagtatctagatccatctgtatagatttagtaataactaatgtaatttttaaaaattgattttcattaacagagttgtctttacgaaaattagcaactttttatcttagtatataactattatcattatccttattattgccatcaatatctttgtcatttaatcatttttccaagttactagtgttgtattgattacctgcttgtttatgacctttatctttaaaatctaactcaatcaatttccaaagttcaaaatttatcatggaaagaactctgggttattggaaagatacaagtataagcaacatatctacttgttttatttttattgaaagtagtaacgtagttactcatcttttgtaagtaggcaattaatagaacagaaatagcagagaaaatgctccttgaactcaactctcttcccccatcttcctaaaaaaaactattcgctcaaaactgggatggtatagcttgtaatccctgcagatacagtaccaacaaaaaataagatgatgtagaagaaataataacactcaattttctccatattttttcaaaatatagtagagatatctctaacagttcccatattcacgatgatgaatttgattaacaaaaatccaactccaatgaatctatgaatcttcaaaatgggcttaacaactatttacatagccacacataaatcaatagtaaacttaattaaaaaatcctactatcaacacagatgataaattttattattattattattattaatgtttataaatttaatggcaagtaaaataaaatattacagcatatttataaatgtatggatatccaatgaagttattattcaaaacattcgtttgaaatcacttataataatgttagtgtattaaattttaaaaataatataaaaagtgttaagctagtcgagatttatcttaaagaataaacaatacaaacttaatgaattaaatctttatatattatgttaactactgacaggtgaactgtcattaatcaaacgctttgatattctcatatgtcccatcataaatctgcagaaaaagaaaagaaaaccaaaaataatccgaaaataggataaaggatttgccttagctaatacaccttttcatcaaaaagcatttaagcacaaacaactaaattgacaacaaaatattgaagatgatacatttctttatctttctgttcatcaaatctctttgagtctttgtgggtcagacgtttctgcttttttttgtcttattatttttcttttcaattttattatcgtaatctaaaagattaaaactttcgatttatctgcttatttgtatgtttgttggtttctaaatggatctttgatagatggagtaagagggaaagtgaaagagagaaaaagtattagatattctgatctgttgcgatgatatagtatgtcttttgtaagtttaatcaactttttctaaaaaaacataataatgcaatttataataggagaattaaactgatcagttaatctacataaaaattttttagagaatagaaacactttaaagactgtgtatttagaaatatattatatatcttgatataaaatcattttcttcataatactaattaataattttatatactccatagcagcagctttcttctctattaaatgttttataagaaatgtttagtatcattcatcgtcttttaaaaaacatgattacttttagaaattaatatatatatatatatggtgaatggtaataagttagataatgaaataaatacatacatataacataaacaaaaagaaaggattaaaagaaggaaaagaaattgtacaaacggttacttactcatgaataatgtaaactgtttgttttcttttctagcatacacatatcgtagttctactattaacaagtatcattaattgtcctaatcctgtatttcacatccttctaacttttatactttatgtaagatgatctatttcttcttttgaatactgaggaattgcatatccacagcatcaatgacggctggaacgatttctgggttagccaaagtagataagtcacctagttgatcagcttcattcgatgcacattttcttaggactcttctcatgatcttaccggatctagtttttggtaaatctctaactgtaataattgcctttggtgcagcgaatggaccaatttcacttctgacttgcaagattaattcacgacgtagttcctctggggatgcgtgaagatcgacttccattagatcctcgccagtttgtttctttagagatacgaatgcaatgatggcttgaccagtcaattcatcattgataccaataacggcagcttcagagacgtcgtcattggtagataaagtggcttcaatttcagcagtagataatctgtgaccagagacgttaacaacgtcatcgactctacctctaatccagtagtaaccgtcatggtctctcccagcaccatcaccagtgaaatagtggccagggtaagcattcatgtaagtatttaagtagtgattatggttattccaaatagatctagtcattgatggccaagaggatttgatcgctaagacgccttcaacatcattaccttgtaattcttcaccactaactggatcaatgatagaagcttcaataccgaagaaaggtaatgtagcggaacctggtttagttggagtggcaccagctaatggagcaatcaaatgagaaccagattctgtttgccaataagtgtcacaaatgacacaattgttattaccgatcttttcattgtaccattcccataaatctggagagattggttctccgacagacccaaggacacgtaatgaggagatatcatatttagagatttcagattcaccaacacgtttaatcaatctcatggcagtgggagccacatagaaatgagtagctttatagcgttcgacaattctccagtatctaccgtaatctgggtaagctggagtggattcaaagataatagaagtggtacctaaacataatggaccatatagagcatacgtgtgaccagtaatccaaccaacatcaccagcagtaaacaaaacatcctctggatgtagatcaaaaacgtatcttgtggtcatggcggcacctaacaagtaaccagcagtggtgtggacaacacccttaggggaaccagtagaaccagatgtatacaataggaataatggatcttcagatttacatgaggttggtggaatataacctctgtgttttgcaatttcttcatcccaccagaaatctctaccagccttcattgggacagatctgttgttagttctggggaacaccaaaatgtggctaacagcgtcgaccccattcaaaccttcgtcgatgattttcttagcatggatagttttaccacctcttttaccttcttcacaagtgataacgactttacagccggcatccacgacacgatcctttaaggaaccagaagaaaaaccagcaaagatgactgtgtgaatagcacccaaacgagccacagctaacatagcaatcagagtctctggaatcattggcatgtagatagcaacagtgtcaccctttttaacaccccaactctttaggacaccggcaactttgcagacagatcttaatagttcaccaaaagtgatggttctactctcagattcatcatcagcctcatagatcaaagcggccttatctgggttctcaatcgcatgtctatcaacacagttataagaggcgttcaattcgccgttcaagaaccaagcgacatcaccggtagccaaggaaccatatttaactttggtaaaaggtttatcccaatgtaaaaattcggtagccatcttcccaaaaaaagaatctggattggtgatggactcattgtacatggctttgtattgatctaagtccttgatgtaagatggtccaggttgtgacttgtagaagtgttctggagcaaaacgtggttgaacatcttgagcttcatggacaactttgtggattggtgcagtcattgttgtcctattgggatatatatatatgcgtgcgtgttgtgatgttgtgttatatggaatattaaatactcgatcaaataagttcagtaaccactccactgctttcttctcttcctgtattagatattgtatattgtatatgaggataagtgtattctaataagtgtatgtatatatatatatatatatatgaccttgttataacgttatattgaatttggctcgactgaaaaaacaacaaaaaaaaaattccccgcttatgttgaattcctcgagagagaaacagaataatggaagaaaaaaaagagtaacagtcgaggaaaatgcgagaaggatgaaaaagacaatagtaacaaaactaacgttgtacagtataaatattttgtcaaatagcgaatatatatatatacatatatataaagaggaaaaaattatgacagtacaagtaaagatgaagtttataggtgtgtgtgtagcaaaataggctaaaaaatatatacacaagtgttcacaaagtcttatacgagaagagacatcatgagtgcaagtaaagaagagggaaagggaacagaaatgcttcgctaaaaatccgttaatatgataaaaggttgaatgtggtagatgactaccggtattaatatctagatacaggctttaacaacacaactgtgatgtgtatgtaggaaactaaacaagataaatagcaatatatgtcacaatatgatagtaaatctaaaataaataatgcttttcttgacacaacaaagcattttttcttttctttttatttttttttttcctttttttattttttcctcagttaaatggaaaaaaaaccaaatgacccacatcacataccggacaagcgggaaataaacatgacggtggaataaaaattgacacgggaactgaataaaagaaatcagagaaaaaaatcagagaaaaaggaaatgtaatatggtacggttgtatgtcaaaagtggttcttaaagagaatacattcaactccatgacagaatacaacaacttcgagaacataagcgttagttgtcaagattaccagtcaactaggaaggggagtgaagaagaaagaaaattaaaaaaatacatatacacacatatataaaagtgaataaactgtcacaatgtcatgtttgtcaggcagtaacgcctgctaaagcagagagatagaaattctaaaccctacacaagactggaaacaaactctaccattagccccaaacttacacctcgatcaaacttgcgtgtgtgtagtcttttgcattccattgtgtgtatcatttcaggattgaacatatatacaaccctaacccctatactacagaataagcaagtgttgttttattttgttatgttttgtctcagcattttgacaagcccttatttttattttccttcactatagggtaaaaaaaaaggtgactaagtaaacctagaaaagtaaccaatcatttgcatttgacagacgaaaatacaaaacacaaaaaataccaaaagaataaaacaaaatcgccttaaaatatttcagaatgtgaaaatttcttgtttatcaaagaaaaagaaaaaaaacttgttagtatgtgagtaaaaacaataagaggcggacatataattttttacaaaataataaaagaaaaagggaagtctttgaaagattcatttttttcttttttattccgttattttttggcaagaacggttatttcggtaatttgcaaaagattttattgtagacctactctcttttactttagtattcattccctcctctctctctcagtagagattgagaacactagccatcatatatgacattcattttttaggttgtggttgttttcctacgtctcctacagatgttcacctggcacacaatcaaccgatatcgttttcttaaatcttaattataatagtgacaaattagtaaacttgatacttcttagtacaaacaattctaaatggagtatataataatttcaattatatccaatacttaatatataatgtacacgtctaattcaacataagaaaattttaacaatcttgtaacagtaaatagcccctctttattttccttattttccttatttttttatttttatttttattttttcaatttttttgttttaatcatcttctagtggaatggacaaatatacttcacctactctacttaaaaattgtctaattgcaaacctcagatcacttgggacactcttgtccaatattttaataatcagtccatacataacagtcccatattctttgaagtcttcatcatcaaattcataataaccttgtaaaatttcaactataacaggcctccatgcaattattgtacgttccatcgttctatcgtctaataaaatatacgatttaaccacagtaacacatatccttatcaacctagcagccaatccagccttcttttcatcatcatttaaatatagtttaaacattagatcaattaaaactgctgctgcactggtctcttgttttaataaattaggaatattattaacgacacgagattccatcaatcttgttcttaacccgatatcattattgaaatcatgtgcaaattcatatgatttctccaaaagttctgttaatttgattgattctttacatggaatgttttgttcaaatgtttcatcatcataaagatcactaaccaattcaatcatcaataactgtaaaatacatttaaccacaatagtgtttttaacattgacttgcttgcgtaaaagatctctatctttatctatatcgatatctgatgacttagaatcactactggtgttattattaacattgttgttgttgttattctcattttctgtgtttaaaacaaaatcttcactgcctgcttcttttttagctctttctaatgtttccggcattgtgtcttcttgatttgaaatattaggtatctttggggtagatgggtcgaacgccatagatttacgtctgccttgatgtaacggatcacattcaaataattcttcagcagtggttaattcaaataatttaataaatacatccccaattaactcccaatgttctgtagaaaatttcgttacattttgcaaaattaattgttgcaaacaggcccttccaattcttgcaatagtatcattctcttgacagatacatgacactaaaagttttaaaaatccatcaagcatcttgtttagggattcaaaataatgagtgaaaagtgcaattagatttctcaaagcttgaattaaggtggtcgataaccaaacacttaaatcatcgtgactgttgaattggttaatttcccagtgtttagatagaacattaaagataggaaataataacttattacatatcttcttccaaaattcttcatcaaaattactaccataagcaacaagtgcatcgaacatgttgttcaaagcacgcgatcttacctcaagatcattcgctgtcattattgtttcattgaaacaaaatagaattgggaaccaaacatcttcaaaaacatctttaccatgtaacaatttctgataatgttctctttctggtaaatctggatcattagatgttattatagcaatacgattagttatagtttttaatgtttctaatgcatgtaacgaagccttttgaaactttctattttttgtaatgtctttaaacacatcaactaattcgctaaatgaatcctcttgaacaaacacactttcaaaatgcttcttgacaatatcatcggtgatcaagctttgtgtcttattgacaatagcttcattttttgattgggatgtgtattgcaaagattttaggattgatttccaaccagactttattttttctgactttaataaaataaaactacggaaacattcaataatcatttcttgcacttcagtatcacctgtattttgtacagtatactcaaatggtttcaaaaaatcatgttggaattcaaacccattcaattcttcaatatctaagaatcttacagacaattgacgtaaagaatcaattgcaaagaaaacaacagctaaattagagtttgtagcaattttattaaaagcagatcccattacggcccaaattggtgtccattctaatctgatacggtccatattataataacaaacatcaatcattttttgtaaagaaaacattcttggagttgaggtatgttgagacgactcaatttcttctaaagagacctgagtcaaggctctaataaaatcaattattgcattagctgataggtcaccactcttagtaaatacattgtccattaacacaacaagttcactcgatgaaatgtatttcaccatatcaggtgataatttttgattaagatgtttctccaacgctagttccatcggcgtagccctcttactccatatatcgaaaaaatatggctgtggagtggtttttgctgaatcgatggagactcttggattagtaacacgtgcttgcgttacgtcaggaattgtgttcctgtcaatacctttggaaattagttgtaatctttcaatttgggatataactaataaaatctctttccatgattctttgatataattaccctcagaaatggctagttccaatagttctatcattgcatttacattttttattttgatttcttcaatgttttgtaaattacaaaattgcaccaaggcaccaataaaggattgtctagcatcatcaatggaaaatatagaagatattctaatagaaattcttaatccttccaaacatttgttggttgtttccaaatcatcgtattccttaaaaggcggtgttaaagctgccaggaaagacatccacaaattctcgaaaatagacttggcgtgctctacatgagatgcggcataataaatatcaccatcattttttagttttgttttgctcaaatttttaaatacaagttcggtttttgatgcaatttctttggaaacttgcatatatgcctctctttgtaaatctctagtactaaaaaagttaaacgcagaggattgttgatttgaaagaacattttcatcttctgctaacatagcttgatgttgttctgatagtaatttaatttcattgttagcaatctcattgaataatcctaccaaaaattccctgggtaaatcttgaccattatcgataccctcattattttctaaaaactcttccaacgacattttattcttaatatgagacgaatgtaaatctgtgttaagcattatcaaagaataagataaaacataagcagtatcggcttttgagaaaacagttgggttttgttctacatatcgttcagcaaattttaacataaatctatcgatcttttgaccttctcctggaagtctaaaggcttgtaaaaattccctaagtgcatctacaatagataaacctataaaatcaaagtcatcaacaaaagcatgcattattgcaatattcttttcatcaccttcaccgagaaaatcacccacagtagccagatttaaaccatctgttgtcaataaccacttggctatagatttgggagagtcatcttccaggaatcctttttcaattaataatggaatagctttttttggcttattattgaatatcgaaatacaatcagataattgagtcttccgttgtttcaaattttccaattgtaatgggtcatctatatcttggctatttaatgtatcaacgtcattgacatttatactagataaagtgggctctgttgttaagtgtgggttttcctttgcattgtttggcattgtttgaggattcaatgctttgtgggcccaagcacttaatgattttaacacagaaacaatgcaccccaatgaagtcatttttaacgcatattccacgggaaacaatgatacatcttgtggtccagaagtcgaagataaggtttgtatagttaacaatggtaattggtcaaaattataggtaaataatggttttgttaactgatcttcatagtatgatctttgagatggtgtaatatctactcttgttaatgctgtttttgtcaaataattaatgatttgttcagtgatatttggcatggaaggatggcaatcataattcaaatagaattcaatcaacgttctaggatcattgcatattctctgcaagataaccaggaaatatctcttttgttgagctgttgaagtacttagttctgcaatcgggaaataaatttccgtaacgaaaacgggaatttctcttagaaactcaactttcaaattagcaatcaataaccaaagtatttctaaagtgatttcaaaaactgggggtattggggaagcagcatttctagataatgataggcataagtactgcttaatggaatccaagaatgtttcgttttttttaccaggtaaaaatatatttggtgataaaaacacatcgacatgctccttcattattaagtaaattatatgtaaagataacaactttgaacgaactgcttgagatctcatgtcaaggttactctctataggctttgcacatatctttgccatggttctaaataccaaaaatgcatctttaattaccaaatcttgaccggaagaaaatgcatcatttttctgagaatcaacaattctttcttcttcatcatttaaccgacccatatcttctaaagtgacaacttctttgaaactgggggcctcttcagataaaacagcttggttgtccagactattaaccaaagatttggatcggtttataaaagttgttgattgattatttttctttaattctattttatcgaacacagaactaaccatttgagttagagttgcctgagcaataccttgattcgaagcgcttaaagacataacaaaaatattgtaaaccgttctaatagcctttaacaaagatgcaccgtggcataaagatatagaatcttcaacaaggatacagctagataaagcacgaataatctgtagttcgactttttcgttggtaccctcaccttggaaacaatcagcaatggtgtcaatagctgcatcaattagtgtttgttttggaggtggtgtaatgccagagtttggatcaacaacttggtcattcgaggccaaagaatcaggaggatttactaatagagtttcatcaagcgatctaaaggaaaacattttggacaggcaatctaaagatactctttgtaatttgctagatttagttcgacaacaacttcttagagtatcaaaaataagtaaagaatcattagtaatattaatattttccggattttgcaaactttcatttaatcttattaatgctctttctactcctttctgtatatttgggtacttttttacatctttctcttcttgaattttttctaatgttactttagctaaatggaaagtagatttgatattattaattgaattatttgaaataatggaggacgttctagtgcgtgttctacctgaggatggaatatctgataatgaaacagcaggctcttgtaaattattagacacctcacttgatctctggtcatccatatcaactgaatcatttttatttgttttaccagataattccaagttattggttgaatctgttgctacctgttcaccatcgttttgtgcgtttgataaagattgatttttattgtgacgatctatgtcattctcaccattgtcgttgcttgaaattattgatatttgatcatcaatatcattatgatcactattattactattactattattattattatcgattggactagaagatctctcactgtttaaatccacagacgatatgttctcttgactatcattttcttgaataggtatattttcttggtcttctacgtccgtcataatgtatttttttttgtatgtttcctttttaatcttagttcctcttaagagagaattgatatatacagaggtaatatagtgcttttttacctaatcaaacaattagataatgttagagaagtatagaatcaaatcaaaagggtggatgaacaattattttctagacaaaataagtaaacaaaacaatataaacaaagataattaccactcacttatagagtaactgaagatcccaagtacctttaattaggttgtttttttattgattcttcaaccgaacgttatttgataatattctaccgcatttatcttgtcttttacttctatttaatcagagaaagaaataaattaaaactttgccttgtttcgtggagagtgatccaaactcttttagggttttgctgggcgtgtcaagtagggcttggagaaaaagctggcataacttctccataaatttattgcaatataagcttacatacttattatatacacacatagaaacgtattggtcttcaccccagtaggtaagcctataaagtggctagttccttaactatctactaagaatatatataaataatcatattttataaataacatagtatttttttttggtgggttaacgtctgtaatccaaacatgaagaattttggatagagtagaatagttttgtcatttttatatgaggaaatgtatgattgttaataaaaaacatcttcacatacacattcatcaatattagctattgaatttaattgaagagtattcaagtagtgataattatgttatatcttattcaagggagtttttattatcagaaaaatactaaagaccatcatcttatttgaatacatcttagtataagtatcaaaaggcaattttgatacttatacaagaacaacaataaaatattaagatcattattatacaaaacttaaataagccgtatttatacctgtagtaactgaacactagcttcttatcatgcaatgcatataatgggtgtatttcatctaacgtaacctaatttactaaaataatttaaactcatcgtatacgaacataatattatttttttctttttgtctcaattataataaacagtagaaatgagaaggtagatgactattggaaaacaattagatagaaatggatatatatatatatatatatatatatatgccaaaacaaaaagactagacagaaagacaaccaagtaccagatcgaataatgatgatatcagtcaaatctcgttctaagaaattaaaagattgtgagatccgtatcaaatctgacgagacacatgctttacaagatgtgctaaaacaaatcagtaagcaaaatagagacattagtatctataggttaagactaacttataaaaaggatgataaacatatcccaattatggaagattctttttttaaaagtgccgactccaatctacaattatatgttaaggatttgggtcctcaaattagctggagattggtgtttttgattgaatatctgggtccaatcttagtccattcattgttatattatttctcaagtattgagcaaattagagataaattaaattattcttcagacaattatgatccaaatttaaaccaaattgtatttttcttgatacttggccattatgttaaaagagaattggaaacattatttcttcacagatttactttagctactatgcctctatttaatgtcttcaagaattcattccactattgggttttaaatggtgctattgggttaggctattttggttatggtttcttattttccaataatcaattatcttggatttataacgccatgggtcaaataaatttatccactttaattggtctatttgtcttaagtgagacctggaatttctacatgcacttgcaattaagagtctatggtgatcaacaaatagccaaaggtaacaccacaaagagagttccaatcaatgaaggtcttttcaaatatttagtggctccaaactacacatttgaagtctggtcttggatctggtttaccataatttttaaattcaatatctttgctttagtgtttttactggtttctgctacacaaatgtatctatgggctatcaaaaagaataaaaaatatggtaccaagagagctttcttgattccatttgttttttaaaacttggcacacctattgataatcaaattattattagaattttatcttactttgactttaattttatcttttgctcaattcatgcaaaatatatacacatatatacacatatatacattttctgaattatatatacatatatatgcatgtactatatagttattatgctatgttaatgatatattatatatcaatcaataataagtactacatcgtcatcatcctgaaatctatcctccatatcactactcatttcatcctcatcagtactctctatttctgtattagtgatatcattcatttgatctatttgatccctaatagtattattatcacggtggctattgtcgctatttgatgttgaaataatgatgtcctcctcatcattcagttcattaaaaaatgcattctttaataattcatcagcagatgatctcttttgtgggtccatttcaaaacactgttctagtaattggaaacaccaataatgatcagtccatatctcttcttgatattgcttcaaactgtatgccattgcatcattgccatctgatattacatctacgggtaattgtggttcgatagacacccgatcgtgtagatcttgttccaaaaattgatatgtttcaaatgcaacactatattctggaaatgttcccacatcacattccttcttcaataattcatatacaaactctttcaatccgttaggatacggttcttctctaatatgatgcaatccgtttaccgcaaaaccgagcccgtgtagtgatgcacatttacgtaaagttttccaaccaaatacagcgcataattccagtaaagaatctgtatcatctaacgattgaaacatagggaatctcctagataagagacttaataaaatcacacctacagaccaaatatcgatttttgttgtctgtgaaccgcatttcattaatacttcaggagcacgaaagccacgagttcctgctctgttggctcttttaattctacgtgtttcgtttttagggtaacctttggttaaatctacaccttgtacattattcagatgaaccagtttcccattttgaattgtcaccataccaccttgatgatgtgctatcgatgcttctatagaagatatagaattattatttagatccctcataatgcaaggacaaaactgttcagagaatcgctctattgtagagttatgcgaagatgacgattgtgttgctgttgacaatgctgctgctgctgctgttgttgttggtgaggaaatcacagacggatagtccagctgagtttcagcaagaccgaaatctacaagtacaccgcggcccaattcagggttaaaaagaaaatttgttggtttaacatctctatgaataataccctttgaatgtacaaattttaatgcattcaacaattcgtatatatatgttttaatacctttgataggcaaatctctataaaaatttctaaactcttcatgtgggtaatatggtaagacagcaataacttgatctttaaccctggctgcatcgcaaagaggagcaacatgattagagcctcctgttaaaatatataatagatttaattcgttatagatacgttgtggtgatgaagtgacataaattttcttcaaagcaacatatttattggagttgccagtacttgaccaaaaatgagaaaaatatttcttggtaaccttatggttgatatcttgcgctttataaaccgttgaaaaggtcccttctcctattttatctattaatttataattggatcgaatatatggaacatcattatagagttgttccatttcatcttttatttcaggtggaataaattcattattatcggttggagaattttgtatttcagtcataagaatagtggtatttgtctgtgacaaaaaaatagaaggccttatttttaatagttaatgctaccaaaataatgacagagcaataaaaacaaagatgaataaaaaaaaaagagaatgctaaatatatatatgttggctctgtaactttcaaaaagaaacagtaaaagtagaacaaataaagatcgaatgaaatctttttaataaccacttaagatgctatagtcacttgtacaaaaaataatggaaaacacagtaaccttgtataaataaatcctctaatagtgtatgttggttcatctaagtggcatctctgttttcttctaatactccttttcacgatctgcaaacaaaatcagaaaaaaaaatatatttatgaaagtttaaaaatggaaataaacagtaaaaaaattatttcgagaaacgcgtcaaaataaaggaattctcacttttgtttgaaacatgagggagaaagaggtttgtctgtatatgagaagcaggggaggaagatgatcgaactgttagctgtatagcaggaagaacataggggggtctggttaacgttaattggtagttacatcaacacagaagaaactgttaccaagtgagaggtcgtttaatataagagatcaaattactcttactactgaaaagtgtgcttatatatttgtggctgattaaagtccccactattctcgatgttaccagcattattaattctatatcttggtgcttttattaccatcttagtaaaagcatcaccaataacatttattctagataagaataaacaagaatgtttttatttgttgactccagatactgattgtgaaataacctattatttttcttctacacaagacggaacctctgaaggcatcactactaataaacctgatctaaactatgaaatttttgcaccagattccagggatgtgcctataatctccaaacaaaatgaaagaaagggccaatgggggtttgtcggaaagcatagaggagaatattcattctgtttcaaaaacccatccttatatgatccaattccggttgaattggaattgacttataaatgtgagaaacagagcagtcttgataagaagcgtgctattagaaggcaagaacataaaatcgaacatccaattgaacaaattagtgaacaaatgtatatttctttatcggacagattagactctattgaaaggcaattatatatgttggaaaagaatatgaaatattacataaccaggaatgatagaaatcattacactgtcagttctactgttaatagaataacaatgtttagtatatatggtatattgttaattattggaatgtcgtggtgtcaaataatgatattgaaatggatcttcaacagatcaagaaaatgagagcaaaaaaaactgttatacggaagaagtcaattcataccaacattgcactatggaacagcaagtatgtatatttatagttgtgtatgcatctatatagtcaagtattttcattattgataaacacagctagcaattatgagcccaattttattatcaaaatttgactagttttctctttttcaattcttttaatttttccagagtcatcaaccggagtcagataggagagtgtggagaaaaatattggtaagggaataacctcagttataatatataaagaaggaattgaaagaaaaaaaagttcatcatgtttcgatgtattttatatcaagggtccttttcagagaatatcaatgtgataaagtcccaatcagatatacagttttctcttctttttttaaacaatttttcagctaaagcaagaagacaaaaaaaataaatagtatagaacagcacccaaggccaataaaagtataaaaatgagtttagttaagactgaattagatgggatcctaccccttatctcccgtggcaaagtgagggacatttaccgagtggatgaacaaactttgttatttattgctactgatcgtatttctgcatatgatgtgatcatgaataattcaattccggataagggaaagctattaaccaaattgtcgcaattctggtttgagtttttacgcaatgatataaagaaccatttagttgaaattcctgttggaaaaaccatatttaactatcttccaaaggagttaagtcaggataagtataagaatcaaattgagggccgttctttacttgtacataagtataagttggtgccattagaagtcattgtcaggggttatattacaggttctgcatggaaagaatacgttaacaaagggactgtccacggtcattccatggttactggtttaaaggaatctcagcaattgcctgaatctgttttcacaccttcaacaaaggctgaccaaggtgaacatgatgagaacattagtgttgaacaagcacaggagcttgtaggggaagacttatgccataagattgatgtcaaggcaagacagttgtatgataaatgtgctgaatatgctaagagtcgtggtataattattgctgatacaaaattcgaatttggtttggattccaacaatgaactggtgcttgttgacgaagtgttgacaccagattcttcgaggttctggaaccttgcaaattatgaggttggcaagggacaagattcgtatgataaacaatttttgagaaattggttgacctctaacaaattagcaggcgtagacaatgttactatgcccgaagatattgttgaaagaacaagagctaagtatatcgaagcttacgaagctttaacaggccagaaatatttgtgaactgatacatatataaatatagatttatttacttctttgcatataaataattattttgatgacattggaatactattgtaaacagcaaaatgtataatgacagatagtaaagtatagtatatatattatatggaggtgtattttgaagagtaagaatagatgaggtagcttagaaggatcgaactcaggatggttgaaagaagaaacacagaccacaatttacaacaccgcacaaatctttgtgacttatcggaacaacggaacacccacacacctcagcagtgcgactctgtgatgaatatttttctttttttgtttgggtttttcccctttttctttttgtgcatgactcttcggttctattgtattgttcgaggagggaaatgacaaacaaaaagggaagagatatttgaagatcaaacattggcgaacaaaaaacaaaagaacatggcagagaaaagagatgacaccaaaaactttcaatagaaaccttaacaacggctagtggaatctgtggaatttgtaggcgaaatacttatattatattatagtatccattttacaccatttaggtgatacttaaatgtatgttaaataataaaaaagattggatatacaataatgcgtgatagccttcaatctcatgcaaacatatatatatatatgtgtgtgtgtgtgtatatgcataagctctttttttttgttgttttgtaaaagcttccacttatttatactaagtttctaggcagtcttctttctctcgagatctattgatattgtgtatgatccaaaaaagaaaactactgttaacttttcagaacgaatcagaaaccactcaaacaagaaaagcatactctctttctctttgttcaattttataaaatacttccctattttacttcattatttttcataatagtaaatgactcaaatagaaaataaaccacctgttctacctagattgcctgtcccacctttagaggatactttgaatcgttatattgatcgtatcgaacctttacaagattcaaagcaaaataaaagaactcgtcatgtggtcttttctccagataatttggaaaaattaaagatattacatgaaaaactggtacaatatgataatgaattagctcaagaaaacccatattcatcatatattgaacaattttggtatgatgcatatcttttatacgatgcttctgtagttttaaatgttaatccatttttccaattgcaagacgatccaacattaaaggattccttttcgcattctaggtcccaaaatggcccctacgggattcatactattcaaattaaaagagcctctaaattagttacttcgatgttgaagtttatacaacaattacgtcaaggtgctttaaaatctgatctggctcgtggtggtgcaccactatctatggatcaatacaacaagttgtttggctctgcaagaatcccacccggtcctggcgaaaattcgtgtcatttgcaaacggatagttcatctcatcatgttattgtgatgtataagcagcaattctactggtttgatgtacttgatataaataaccgaccattatttaagacccctgatgaattggaatggaatctttattccattatcatggatggtaatgcttcttccaacaacgatacagaaaatagattaccgtttggtgtctttaccactgagagcagacgtatttggtccaatgttagagactatatttatcaatcaaaggataagacgaattggaagaatttgaaactgattgattctgcattatttgtcatctgtttggatgacgtcgcattcgatgacacaccagaaggacaaactgacttaactacttcgctgctttgtggtacctcaaaagttaatttagatttcaaatccgctgctacaccgctaaatattcaaagtggtacctgtttgaatagatggtatgataaattacaacttattgttactttgaatggtaaagctggttttaatttcgaacacactggggtagatggccatactgtattaagactagccacagatatttatacagattctatcctaggtttcgctcgtggagttacaaaaaacgtattggatatttttaacagaaacaataatgaacaagcgttgtctttggttaattctgataataataagcaaagtacaagcactgagaagctagaaaaacataatgttattacgattccaagaaagttagaatggcaagtagacccctttttattatcatctctacactttgcagaaactaaaatctcagacctaatatcacaatatgaattagtcacattggatttcacacattatggtgcatcacatattaaaagacaatttaagtgttctccagatgcattcactcaacaaatttttcaaattgcctactatgcattatatggtaaattcgagaccgtttacgaacctgctatgactaaacttttccaaaacggtagaactgaagccataagatcagtcactttagcatccaaaagatttgttaaatctatctttgatcgtaatgctacagatgatgagagaaaaatatacttacaagaatcatgtaaagagcactctcgtatcactaaagaatgcgcagtgggtctcggtcaggaccgccatttatatgcactatactctatttggaatgaaatgtttaaagatactatgccattgccaggtatctttcaggataaagcctggtccatcttaaacacttcaattataagtacgtctaactgtggtaatccatgcttaaagagttttggttttggcccagtaactccaaatgggtttggaattggttatattattcgtgatgattcgattacattagttgtgacatcaaaacataggcaaactaagagatttgtgtcattgcttgaaaaatcatttttagagatcgatcatatatttaacagacaaaatgatactgcaggtacaacagcaaccagtcaaggaaaggatattttaatgaggattcataggggtaatgtagcaggcactctggaaggaactaacaaatcaaaggatttgacgtatctattgtcgggttatgattactttgatgtttctgttactggataagtttttttttttcagttatgttcatattccacacgtatttattgataagaatatatctatatgtatgtgtcctttagatttacatattaatgattcatatatattctaaaaatatatgtgcagaatgtataaattttgttggtaataataattataataatattattttaactcgatgagttaaatataatgaacgggaaaagtattttaatgatgtgaagatatggtttttatatggtcgtgagtcataagtagatagttatttattaggctttgcaaatataagttacattatccttgcagtgtttactgttcataattgaaaaacataatacagttcagtacaaaaaacattattaaatgtttttgatcatcccaaaaaaaatactaagcgattaaaatataggcaagattaaacaaatattaagtacctaagtaagtgggtttggaaatgttgctgtaattattccaaacacttcctgttcgttacaaatcaggaacgattggagcaacttttcaagtctgtagaatataggaggaataacagaaaattatcttaggttgggctttctctagtataagagtataagataaaaaagacagattgttgaagcactattatagtatgtatacaccaatgattcttccaaaacagctttttcacaagcagaatctacatcacggaatctcctttattccgtctgtttccggagaattccaaactcacattttgtttgtatatgtttacgtttcttttttttttcttttcctcttgagaatatttgtgtataatttctcatagaagatgcaagtaaatatgtttgaaaaggaaaaacggggaagctcgtaaaatctttatgcatttggtacgatcgttgccattttattacgatcattctctttgtcttctctcttttcttcacaactatataacatctagacctcgtatctactgctagttgtcattatcattcgtaataatattattgtgtctctataaattggtgtttttaaatcattcattttataattgaattaaacaaactctaatcattgtaacaatgtcggacactaatggtgcagatgtggccgatctaagtaaaccgttactaaaactaaggctcttagaaacacttcgtgacggttcatttgatgaactttccaagtttattgctacgaggtttgtttctaaagataatccaattattcaagaattagcatcaatcattttgcaccttgctgttcaagtagcacccgacaaattagttaaaaatattgtaactcaatgggtcgacaatccaaaacaatccaaaaatatattaggtctacctttagatattaaccaaagagatgaaaatggtaatactcccttacatttagctgtgcttcagtctagagacaatattatccaatttttcttagacaatgaaaatatcaatgaaatgataatgaataaggatggtttattacctatcgatctttgcaagaatttgaatgttgctgaaatgatgcaaaataaaagatgtgcctatatgaataatgtaatgaaacaagctgatactgcctttgagagaaaagattttaatacattggagcacatatttgctaaaccaagaaaccaggaatttatgaatattaataaattggacccattagatcacggtaattcgttgttacacaaatatttgttgaagggagatgtcgagacttgtaaatggttactaaatcatggtgcaaatccattactgaaaaatgaagaaggtgtgtgtgcgttagatataattaaaactaaacaaaagacaaacaaaaatttagatcctgcattaaagactttgcttaatgatattttgaaagaagaagcagtagttaatgctactttagcaatcgaaaaaccgcctacacaaaaaggttacttgaaaaaatatgcacacatgggaaaaggttataaattacggtactttgtattaagtgaggatggtaaattgtcctattataaagatccagcttcatatgctgccaataaattaccaagaggttctcttgagttagataaatgttatcttcatatggattccacagaaaagttgaaattcgaagtcataggtggaagcaataattcagctaaatggaaactaaaggggaatcaaaccatggagactaatagttgggttatggcaatccaaagtgcaattcgttatgcgaaggataaaaaaacttcacaaaaatctaaaggacagcatggattgaaaattgataccagcacagatagtttgcaaactccaactatgattcttaatagttataaaagtccaactttacaaaaatcaaatacctttgatgcacaatatgctagaaaacagaatattggaaggcaatcaaatctttctccaatgcatcgcaagtttactgatatccaagcctctgattccagtgatattaagttgagtaataaattgaccgaatctggtaaaaattatgtgaaccagatgattgattcaagactagaaagatctacctctctttcaagaaagagctcaatagtagaagttgggtcaaagtctaccggcccaatgacaccattgggtagtcctaagttcatgacttcaacagcaggtatatcatatatgagtatggacaacctagatatgagtaatagatcgtttgttggaagtcctatcacaacaactaaaactgcaaacggaattaatacaggatatcaagaaggtgttgttggtgaaggtactgactctgaattagaaggggatgaggaaaatatgactgcaaaatataatagagatgaggaatatttgaaagtggaatatggtccatatgtggaaaaattgaatatgtatcaaagaacaattgctttagaattatccacgattaatgaaattattgattcaacagattttattaataataatgatgctgccttggtcactattaaagaatctttgttaagactgtcctcgaatatcacagaaatgaattcgttgaccttgaaaagggatgaaaaattagtatccatgttggcaaaacaacgtgatatgaacaacgtttggattcaaaccatgaaggacttagaaattgagttagaaaataaaacagagagattagcaactttaggtagaggcagaagaactttgaaaagaactttgaaaaaaaaaatcaaagaagttaaatctcaaggcaatatgaattctgaaatatctttacaaagtttggcaaaggtaagttcatgtgatactttgaatcagattgctagatttattacggctacgaaggaagaagacgaagattctgctggcgatgaattttacgatgctgaagaattggtagatgaatcatctgtacaggaatcgcatgtagatattattcataaagatgaaggtgatgtattatcatatacaaatacaaatgcttcaatgccagaagaaggtaacacaaatagcgatggtggtgatgtttcattgactcatgagaatatggcaaataatgtgaaatctataagtgaatccttggaaggcacagacgggccgattatcatggaatcctcgcataaaacatcaaacagtgcacaatttgatgatataaagaagaaagtagaagtagaaaaacctgtgaaggaggagaaacaagaggaagttgttgagaatgctgttgaccagtcattatcagagaagatcccagagaaaaaattatttgccgttactacggcgcaaaagaataaacaggctctgattttgaaagaaggatcttatttgggttatgaagatggtccaagaaaaaagttggcgttagataaagatgaaagaccaagggtgagtctatgggcagtattaaaatctatgattggtaaggatatgactaggatgactttacctgtagtatttaatgaacccaccaatttattgcaaagagtagcagaggatatggaatgttcatatttattggatcaagcagctacattcaaggattctacattaagattattatacgtttccgtctttactgcatcttgttatgcatccacagttggaagaatagccaaaccatttaatccgatccttggtgagacatttgaatatgccagaccggataagaattatagatttttttcggaacaagtctcgcatcatccaccaatttcagcaacgtggacggaatcaccaaaatgggatttctatggtgaaagtgctgttgacacaaatttcaatggtagatcatttggtgtaaaacatttggggttatggtacattaaattgcgtcctgataacggcgatctgcaagaattatatacgtacaagaagccagacaacactgttattggtatattggtgggtaaccctcaactggataatcatggtgaagtacatatcacaaatcacaccacaggtgaatactgtatattgaatttcaaggcgcgtggttggagatcatcgagtgcatacgagattaaaggtgaagtattcaataagaataaagagaaagtttggatactagggggccattggaatgattctatatatgcgaagaaagttacggataagagtggtgaggagtttataataaacgaaaagaataatggtaaaaatggtaaaaataataaagcagtggaagaaagacccaattatactggtgataaatttttagtatggaaggcgtacccaagaccagattcaccattcaatttgacccagtttgccatcacattaaatgcaccacagccacatctattgccttggttggcaccaacagacacaagactaagaccagatcaaagagccatggagaatggagaatacgataaagcagcagatgaaaaaaatcgtgttgagcagaaacaaagagctgccagaaagtatagacaagacaataatatccaataccagccacaatggttcacacatgaggttcatcctgtgacgaaacaacaatattggaaatttaagggtaattactggagcattagaagagataaacaattggcggacaaaggtgatatcttttaatcaaaagtaaaatgggagataagggaaggaaaagacaagaaatgttgatagacagagtgacccattttagcattttatcattttattattattagtagtacgatgtatgtatggtatatatttatgaatcgattttagttcattatgtgctttaaatttgttatgtcattgcaagtaccaatctttgtgtttaatcacgtttcgatcgtttttctggcgttttctgttgtttgtctataaaacaaagagaaaataagaaaaataaaggaagaaaagtttaaaaaaaaaaaaaaaaaacgtatccagtagttaccacctgaatgcaaattctctattgttttttcactcgtttctttttggtttatttcttttctagaatattcttctcttccgcggaagaccaggaaaaaaacaagaaatagtcaaataaataaactaaagccttcttccgtcgttccgttttcttttttcttttttcttcttttttcttttcgggaggggaaaaacaaaagcaatggtccggctttttctgtttattatgtgaggtatgggtgtatccccaagaagcttagctggcctctcttttcttttttttcttcttttttctttacattagacaactgatttggtttggcagtttcctcgcaggtgccgttttgtatggaaaaaagagctctggaaatatggctcacatcattattatctatctgtgttctctctctgttgtacgggagggtttattcgcagagcgagaaagttttatcaatggagtattagtaatacttgttttcgcaagtcaaaagccatcttatcttcccggattgttttttctagtctattatttaagaacagtatataccgttgaccttgttacacttcctatctctttctcctttctctctccttggcttggtttcagtagtgtgccagaatccttgtttcgatcataccggttttttttttttttccttactaagctaacgctatattcgtatatatacatacatatacgtatatatatacatatatagatagacagagaaagaaaaagatcagttaggcttattttattgcttgtttagaggaataaaaatatacaagtattataacatcctatcttttgtttgaaaaaatataaaaaaaataatataaaaaataagagataactattcaattaataagtgaaaagaagcaatcactaaaattaggtaacattaaacgtggaaaaagaaagtttttgcaatatcgattttttttttattcatagaatttaattatgtcgttggttgactttgaattgaaaagaactttgactgatgttttagaggatgaattatactatataaatatacccaatacaataacaacaacagcaacaactacaactacaattacaaatagtaatagcactactatccatcctaaagataatgttgatacaaacatgctctccttggatggaaatcctaacgacagtcataacaatagttattcattagataatgatacttttcatccatctcaaaatcctaatgtctacagcagcaacaatcaaaatcatgccaatagttctattttcagttcttatgctgatcctacattgactactaccaccacaatgaggaactacattatcacatctgaacttggcactatgattcctgcctctcctatattatcctcccttgaatctaatagcaatattcaaaagactgttaatttgaatactcttgtcagaaattcaaatgagtatcgacccactatttctaacactttttataataatagcagtagcaacaacaataacaataacaataacaataacaataacaataacaacattatacttcatggtatgaatacactatatgatgttaagatatcccccgaaaattctttatataccccaatattagacgataatgaatacatgtcatattatgacgatttctacaatgcaaaattggattctatgccattaaatgatagcaacagtgtattaaatatggatagtgcgagaatgatctttgaccaagagttttcggacgatgatttggaggaagacgaggatgaagatgacaacgttttcgatatggccccatccagtgccttttcaatgactagtgattaccccacctactatcctaatgatgtacctctacttactacaaacgagttggatacatcggctctaattgacgatcaggacgatagaaaggatagatgtagtgatattgacatggatatggacgcatgtaatcattttcgagggagtgatgataccgagcacatggttgaaccactggtgtttaactctaaattattggcttcgaataagtccaaatcgtctttgttaaaacataggccagaattaatgctgccaaatggatcaggcaaacatttagacacaataataaggaaacctctaggttttgttgatggtaataacaatagtaaaagtaatattaaaggtaatggtgatagtaatgctagtagtaataagaaaaaagctgataatgaaaagaagaaaagagcgcgtagtgcaagattaccaagtaatataaaccatggatcaaatgaaatttatacatgtagattagtgaatttagtcactaatgaaccatgtatggcacagttttcaaggtcatacgatttgacaagacatcaaaacacaatccatgcaaaaaaaaagatcgtctttcgttgttctgaatgtattagagcattaggtgacgagggctactcaaagacgttttctcgtcttgatgcattgaccagacacattaaattaaagcatgaagaattgacgcctgaacaaagacaagtggtgactaagtacgctaaagaaaatattggttatgttgtttgaaatgcaacagagcaaaataaagcaagtcataaactgagtgagtgagtgttgttgattttcttatgtatttatctatctgcattgttgttcatggttattattattcattattgagagctgcatatactttattctaaatatattacatataaatcatataattattatacattcctgaatttagaaaaaaaacatatatttttaacccttttataaatatttgatccaagctctttttaacccgctcaaatgcatcaaagcaggaagaagaaaggagaatatggaaaccacaacattacacacacacaggtatatatattgttcatagtaaaataaactcaaatgtcatttattattctataactaaaccttacaaaactaataagaaataaatatgtatgaataagtatatgtatgatacaaatgctttgcaaagaaaaacttttttatgcctttttttttctatttttttttaagcttttcgtaattttatcatagagtttaaaatcttaaaatgaatatatggatgaaatgcaaaataaaaatgaatgatatttataagatatgttgatattatgcaatacgaaaaacgcaagtagacaaaaaaaaacaaaaaatgaagatgtcataaaccttttttttattttttttctctctgcctacctatgcttcaaacttattgttcgatacgaaattcatccaactcatcgatcatatctggaatcttatccatagcgacatgattgtaaacaatttgataaacagcttctaataatgggaattcgtgaatcaattcacaagtttctaaccattcatggacttccttacaggtgacgataccttgagcagactgaccattcaaaagttctttttcagcctccaaggcagacttaccggtcttagccatatgtttagcaaccctgacgtttctaccaccggaacaagtagtgattaaatcagctacacctgcagattctttgtaaaaagtctcgacatgacattcagggaagaacatctggccaaacttgatgatttcacctagaccgacacgttgaatagcagcagaggcattgttaccccagcctaacccttcaacgaacccacaacctaatgcaacgacgttctttaaagcacctgcaatggagataccggcaatgtcatcaataacagagacatggaaatatggtctatggaatagagccttcaatacacgatggtcgacgtctttaccgtcacctctataattagaaggtattttgtaagcaacagtggtctcagaccaattttccttggctacttcgggagctaaattagcaccagataaagcaccacatgtgatatctaattcatcttcgataaaggaggatagtaattgaacacctttcttacccacttcgaaccccttcaaacaagaaatagctctagccgttggtttaacgtgacccttcatttgttccacgatacgagataagaattggtgtggaacattgaaaatgatgatatcagcgtctttggcacaatctactaaatcaggattggccaccaaattgtgaggaagcttgatatctggcaaatacttaacattttcatgttttgtattaatgatgtggactaaactaacaccgtcaatcttctcgtcaaaaacccacatattaactgttggttgaaaaagagttgggtgtaaagcggtattttcggaaaccacttttgcgattgtggtcccccaattaccggagccaatgacagtaactttgaatggtttgtctacatgtagaagagacacggaagagttgcatctattgatggatttgtctaaaatttgagaagtttgatttaatctgtcagaggcagtcattttcctaattgtatattctactttaactcttggtttagttcttggtttttatttggttatcaagcattgaaagacaataagtgatagtatattagggggttgactactcagttggatcaatttgaatcatcaatccctttcttatatattaatcagacgaatttagaacaattagtcaatttggccatcaatgtgtcgagggactaaaatgtgtgacataattgtgcccaaagtgggacaaaaaaaaaggaaaaaaagaaacgaagaagaaaaagaaacgaggatgaaggaaatgaaaaagtaacaaaaaattctcgaggaacatttttctttcttcattgtgatggaaaaaaaaattaggaattccgatattttgatcgtttgagtcatttttggcccagcagttcgtcccattttgttcattttggctcatttttgactctatggaggtcataagggtgttcttttttagtattgcgacccaaaagggtaaatacacaagcacacaataggaaaaaaaaaaataaacagaaaagcatagggaggggcggagaggggacaaaattccggtgaggtcattgaaagaatcaactgcaacaatagaaacttgtttatcgccaaatacgacgatcgaaatgattcagaatttctcaagtggtgtcacgtgagaagttactctttctattttggttgtttttctttttcttcttcttgttctttttctttttgtttgaaccactgggtcaaatttgggtcagtctttcttcagtggcaaggaaagagaaaaagaagacacgaagaagaaaaaaaatgaagaagtcaccaaacgggaggagactaacagacaaagaagcaagtgggatgtgtttgactcagttgccgtgttatacgattttcacgtcacacgagtaattacatgatttactctgaaggtgttttcctttcacgaatcttgaatcttgactcggtgataccggaatgtggggatacacaacgggaggttactatagagtgcaaaccaaacgtcttcaacaacctgagaaattgaaatgtctctctttctccttcttccttttctcctgtttctcctgtttcgctagcatcaaggcttttaggaagttttgtctattctaacggatagagtttacaaaggtaatgaggggatgattggcatgatttttttttcttttttcttttttctttttgtagttaagataatggactctctttcagtaagatgggacaaaatattaatgttagggttataacaaagctcagtcgtttgttttgattattttactattttaatgtagggtatttgtatattatttatggaaaaaaataaggaaaaaaggagcgggagattttactttttcctttcaaacaaaaaataatatatgtaactcatctccagtgaagataacaaagactataatgagaaataattttaattaattactgaaaaataaaaaataagaataaaaagagtgaaaaagtgaaaagaaaaatcgatgcctttataaataatagcatacatacaactgatcttctaaattaaacttaatggaaatcagactctttaaaagctccttgcattaacttttgattatcgtatatctttttttttcgctattaaacaattatgagtaatttcatcaaaagttggtaagggaaaagaatcatagatatagaactttttaatttggtccttattcacttattttttttcatctgtcatctttttttcgatttattcaattattgatttgctttgtttaaatatttatggatacaaataaatctacagtttcattatcttctatatttggtggctcaactaaatttaaaggtttatccaataataataataatggtaaaaatgacgttgataatctgcttttatctactgaaagacactcttcctcacagttatctttgaattcagagtataatcatagttcgttgtctcttgctacaactttaagtgcattgaatagtagtttatacccaagtgataataataacaataataatagcacggtgattaaaagtagtactgaccctcacttaaatagtatttctaatacagatatacagaatacaaaatcagaatcaaaatcaaaatctattttatctgatatggcagaaggagaagatgaagacaaggacaaggacaacgaaaatgggttcacaatacatcctgtcaaggttatacaatctaaattagaaaaacaatatattccgttaaatattaatgagacaatagatcaatattccatgaacacagtacccacttccccatgtaatcctattccggataattatgataatattactctcttagataaatataatatactgggtgaaacaataggagaaggtgcctcaagtaaagttgttcttgtatcacttaaaaatgattcaaataaactctatgcaatgaaagtgtttcactcaaatagagtcttacctgactcgtatgatgcacacctaaaaaatattatattagaatattcaattggttcagttttgaatcagcaaaaccttataaaaacattagacttattaattgataattcaaaaagaacttcgataatgatactggaatatgcaccgatcgattttttcgatttagtagtgcagaaaaagatggataagtatgaatcagcttgttattttaaacaattgtgtcatgctatccaatatttacataatttaggaatagcacatcgcgatttgaagttagataattgtgtggttatcaaacagggtatactgaaactattggattttggtagtgcggtaatattcaatgactattattctagtaaaggttcagccatttccaatgatcatattactaaatgtattggtattgttggcagcgatccatacctttcacctgaattattagaaccaggttgtagacattatgatccaaggccagtagatatatgggcattggctataatgtactattctatgatactgagtaaatttccatggaaggcacctcgagaaagttttaattcatttagattgtttgtagaagatccagatgatgaggaagatgtctcaaagggtccattgcgtttgctaagagcattaccatcagaatcgcacaatgtgatagcgagaatgatggatttgaatccaaatacaaggatatccattaacgatgtgttactagatggatggatgaaatctatccctgaatgtcatttagataatggaaataatttaattcataacacagaagatcatatacatcatctagaccttgatcatacaagtcaaatgcaatgtaataataaaagtagtagtattaatagtgaaaatgctactacagataatgtagctaataatattccatcatttcaaaataaaaaagaaccatcacataactatgccaattatataagtgggagaaagatgtctttataaatttaagcacaactttctagaagtttatatatattgtaattacgtatatttatacaaacatacaaatatttgtattattgtaataaggattcgttattatatagattagagaagttttgttatgttgatttcaataatacggtggttatgtttgttttacgtacaaatctcatgttatgtacgaaaaaatttagaaaacatgaagagttttttaatttcaacaagaggattgtagtattggcataagtggacctcagttattattgtttgattattaatatgtgataaagtctaataaaacactaaaatgcgagtgatagacatccattaaagtatatctggctactaatatcactttgtaggtactaatcaagtggagtacacataagaagaaaaggaggtacttttcagtatggggaaacagcaacaaaaacagcaaggaaaaaagaagtcaagaatagatgagaatggtactttattaatagatccacctaagtctgttaatgccaatagagaaaattatcaaagattgaattatttatatcaattatcgacatggtctacactgatgacttcgaacgtggataatggatctatggctcgaatgtacaacaaaaatttagacttaattagcaaaaaagtaaaatgtaatgtatcacctgatattaaacgaggcatatgcaagaaatgtaatagacgattgatacccactaggacatgtaagataattttacaaaataaatcaaagaaaaaaacaagtataaatgatgactttgtgataaaatgccaatgcggcactgaaaaggtgtttagaattgggttgaatagaaaatataactcattctataaaagaagtctagtacagatgccgtagaaatatatatggtgaagatttcaatatatagttggtctattttagttcgaatgggagttttctaattggattgtgtttatgctatcggacaatcatcccttctggttttttactgtcatagacattaacagcaatgctaatagatgtatgaataggacttatcttccatacatcagcctaatttatcttttccagctattcgtccacaagcagaatgtgaagacatccgaagaagaagaagcgagaaaaagatttagctataattgaaacaaaggatttatatctcacaaatcgccagataacacataggatagatatatacgttctgtagatactgcatgtatataagtctgtactttatcatatttaggacaagaatatatgttattatcgcagagtctattataaaaatatatataaaaaaaagcaaatgaggatgtccatggtgataatgccaacctttaggcaacttcgaccacaacctttgtctagtttatcgtactatatatcgccattaagattattcagtttctcctcaaatttgattcattttaattccacatatctcaagggatctagtattgagcaagttaataatttcatagtttcaacttatagttcagctttaaatggttataaagccataaatataagttcaagatctggatcttcattagtaggatatataagtaatgtccatacatataacacattacctttaattcagagtaacacatatcgatttgtaaactatagaaatttctccacattgaaacgacttcagtttaaaagaaattttatgccaagacaaaataataatggcttattcccacaaataaaatattacagaataaacccatttgtattgattattagcagcttcttgtcaattaccatgttttttcttgtacttccaataattttgaacttaatgttacctttgaccatattagccattattatttatcaattcaataaatggaaaaggagtcagttctatcaacaagtagtaagagttttattaagaagtgatatcatagttccatatagaacaatcaattcattacagtacagtttcataccagagaggctattaatgatgaaggatttaatgaaagagctttcaatgtttagaaatttcgataacagtaataatacaaagaaggaggctattcaattcgttcaatttgtagaaacgagaatcatggaagcattagctacagatgaatatggtataagatcttatattttatccaataataacaagtttcgttcgttccaaaatttacgtaggtcatctttttccactttccagttaaaattggatacagtttctatgaagacatatggtgaacgtgttggatcaaatacaactgatattatgttaagtatacaatatcctttgaaactgattatagaagaaaatcagcaaatttatttaggtactgtaactctaaccattctagatgattcaagtagtaaaatgggtaataattcctttaaattattcactgatctggccaaagcagacgctaaatgtagattagtcatttctattgtccctgtgactacttggttatcacttatcccaagacagtttgttatatcaacttggggtaattcagggcaaaattttagaaagttttatgtaaacaagacaagagatggacatgtagaatacactattcgttaaaaaatcatataatttccctacatattctcttggatttgtattcttccgttttggttaaataatgttcgtaacgcgaaactttttgtagatacaacattgtttagggttaaaatacatacatatatatatatatatgaatatctatacagtttatttaaggtggagacaatgatatgtatgcagacttgataacgattatagttaactagaaaccatttgcttgtttgttgtacttactgtagcaccttgttctgtagactcttgcttcttcttagagcatgtgtctctatatctttagtatatatgttacccgcaacattaaatttttcggacacttcttttttttgtttttgtgtaaacaaagatttaaagatctttaaccaaaaaaatgaataaataaataagtgcgttatatataattggttaatgtgaaaagaggttgtctccaaacaggtaatattgataaatacatcttgtcttctctgctggcttatcaataatattattgagtgaatcagttaggtcgagagattgtatactactaatatatctgttttatgctctctttttttcatagttaaaatattatcaataggataatttttggtttatttatttggacagttttccaaacaatatctaaaagaaactatcttttcgaatgtttcgatattctcatccctctagaagtcatatttcaatgactaaacaaaatatggggattgctaaaacaacaaatgattctgtatataataataatagtagtaataatgttaatgattcagatgaggatgaaaacataataggtcctcctaaattaagtaattttggatctgcattgttaattgatcaaaatcatagttcaacatttacaaaatttcaagattgtagaaataataagcattcacaactattaaacaatgaatatagagtacagcatacaatgccagaattggatgagttaataaatcaagaaactccttctccttcttcatcttcctcaatatttgcaaatactattaatcaaacttctattagaccaacaagcgtaacgacaatacataatactagtaataacaatggtaatagtaataaccatataacaaataatattaataatagttatagtaaaatattttatgatactgaaatgatacaaaaattgaagcaaacaatgacaaaagacgagctgcttttgagtgaaaaaatattagaaagaagaaataatagaagattatccagaacttcatcaaatcattcgacattgaattttaacacctctcatacaaaggaattagaactatcaggcaatatttcaagtaatattagcaacaataataataatttaatagtagcgacaaactctaatgataattttcaaagattgaaagcgttgcaacaaagtttaaaagaggaagtgacatctaaatatatggaaaggcgaagtaaaagattcctaaatgtgaaaagaatgagtagattaggaccagccaagagggcttcagagcttgttggtatagaaaatgaatatatgctgatggattcagattctaaggctaaagaggttataacgagcataagtgattatactactaaaggggataataataataataatgataataataataatgttgatattgatggaaaattggatagtaagcatgtaatagatgattctaaattcacaaatgactattccaatatcgattttggagatttgaatccattacaatatttgaaaaagcataatattcctacaacagaattacctcagattgccaagatatattttcaaactcagaagagggggaatagagctacagctattagaaagagatcattgacgcctgttactagtcaaaaactacttgaagaaggtaatggcaaaaatattttgaggtcaaggatggatatatccaattctaacgataaggaaaatgatataaagaacaataacaaattacagattgaaaaacaaggtattaatattcaacatagaaattatgatacggataagttatcaaagaaacgtgaagcattatctagcattaatattaataaaaaggaaccagatttcaaaagaatgaaaagtgatccagatgaattaaagagtatggttgatgaagaaaaaaatgttaaaaatccggttcataaacctatgaagaaagtagagattcaagagcctactgcttccaaacgttatcatttacaaaattcactacgagacgataatattaatagtggtaactatgttggacataatggtaggaatccaattatattagtaaatgatacagaatatgaaaaagtggaattattgggtcgtggtggctcttcaaaagtttataaagttaagggaccttcaaataaaatttatgcgttaaaaagagtagcatttgatgaatttgatgaatcctcaataaatggatttaaaggtgaaatatccttattagagaaattaagaaataaggaccgtgttgttcaactattcgactacgaaatgaattcaggtgtactgtatttaattatggagtgtggtgattatgacttgtcatatgtacttaatcaaaaattaaaatcacctttagacatcgaatttattaggtattatgctagagaaatggttaaatgtgtaaaagtagttcatgatgcagacattgttcattcggatttaaaaccagcgaattttgtatttgtaaaagggatactaaaaattattgattttggtattgctaatgcagttcctgaccatacagttaatatttacagagagactcaaattggcactccaaattatatggcaccggaagcattagtagcaatgaattataccaatgatagcagtgggcagacaggaaacagatggaaagttgggaaaccatcagatgtatggtctattggctgtataatatatcaaatggtatatggtaagccaccttatgcaggatttcaggggcaaaacagattactggcaattatgaatccggaagtcaaaattatgtatcccgataaaacttctaaagataaagttattcctagatcagtaattgaagtaataaaggatagtcttcatagagatcctaacaaaagattaaccatagatgaaatgttacaaactggattctttaaccctataatggtatcagaatcatttataagaaacttgattaagaatgcagtctattttggttgtgaacaaaatgaagtatctgatatacagattgatgacttggcaagtgatgttattaatagactatcagaatttagaatataactgagttaaagtatagataatattataaatagcatgtattttctttagtttcaaaggtttatatgtgtgtgtttattttttgaagtgacagttgtgtaaaattttttattggttttactgccttacgctttttgtcactaatttagcataatattgtcaatccattaaattatgaatgtgtactttaggaaattgatgtaaacagaaatcatagtaggaaaatactatggaaattttgtttaaatagaatattttaaatatattaaaaacatcgaataaaggattatccaaattccaatgattgtgaatctattgtcgtactttaacatttaaaacaataaatcataaatatagtaaataaaaaaatgaatcaatcggccaatgtaagtaaattagaaataaataataaggatacctgctaaagtgacaacccgaattcaagatagatcttataatgttgaccttctgtttcatatgtaatacaaatcgtcccctgagaatggatacaccaagtaagagtgttgattagaagttcatatattagggataaaagtttagagatattgaatattttatttttacatttttttatgactctttcttatttcattaatatgctatatttttatacatatataactgaagaaagttttcctaattgaatatattatatgttagtcaaatatatacattgggtaatactaagttagaaatatgttttgtgaataacgatgcagatactcatttcttatgaaattttattaaagttagaagaaatcctctagttttattaatgaagatttttataaaattaaaaaaagaatatattacaataagttacgtgggtttgtcaatattttgataatagattgaaggtaaagtcaaaaagtttttgcatttttttttttcacagaacaactaaagatagctaatttccttattcttttaattttttgtgtattattttacattttgtttaggcttctttacgtttgttcaatttcatgctctaacgaaaaaagagtagacaacaaattataatttggaaaaagtggaacactctataactaggaacttcaaaatatcttgtttgtggtaacatttaataaccaaacaaatggtttattgttgagaatgagcgcctgtaatcattggatatatagtaaaaattttcaatattatattaaacagatttagtataaaaaattataataaagttcttcactttctttctctatacacaacatagaaataataatatacaaatattgtaaatgagataaaaataatgtaagataaaatccttggctttatatatgttaatattcagccattttcctctacaaacagtaagatatttaataaacaaactcaacaacttttggtgacctctcaacaattattactcaacaatttatcgtttagtgtctgctaaaatcttattgttctatctatttcattatagaacattctatttcaacatttataataaccagaactttcggtccagatcataagtgtgttcacatgattgttgaattaacacagctaatatattactaaaaaactcatttaagagactgtaagttatttaaagagtatatgcctgaggtaactatcaatattaatagttgtattatatcaactagatcacacccaataaatatcaaaataataagaacatgaattatatagaaattgatttatcagttagaatcgacgtttctataatttgcaagtaatcatatatagttaataatcacattttaatatattaatctgagataacaccttacaaatatacggtacaattaatttatgtgaaataaaaaaaataatccctactcttgcatagataggacctaaccatctttctccctgtatatggacacgaggcgggacctatataaagtttgataaaagtaaatcaaaataatcaatccaaatatttaaactccaccatccaatataacaagcccaatattacactaatttctatatgagttgttctttccttcataaaacctaaaaatctaatgacaacaaaaaaaacatatcccataattcattacaactctttcttttatatgtttctgtctgccttctggctctttgttgagatctcaaagggttcagattccattctcgaatttctaaaggcaaaagaaaaaaaataaatcaataacaataaataatccaacgttcgaccgttaatgatggtagaagaaaaaccctaatgatacaagtatacaaaaaacaaactgagatatacatacaagcaaagcaatatgaacacatactccaatggattagtaaaacgagtaggacaattaaaacaaaaaagagaaatacaataaacgatgaaaagatgtctatctttattggaaaaaaggataccacaaggttggaaacaattacagccgagcaaacatgacaacatagtagtggctatgtcatcaggggttgattcgtctattgcagctgcaatatatagttcttttcctaatgtgaggggtgtctatatgaggaattggagcaataaacagaatgatacgaaaaattgtgatgaaaaggattggaacgatgctaaaaaagtagctaaatacttgaatattcccatcgaaatggtcaattttgagaaggaatattggcttgatgtgtttgaaccgatgttgaacaattacgagctaggactaaccccgaatccagacattttgtgtaatagatacattaaatttggtactttaaaacagaaattagatgaaatgtatggagtcgataattattggttggtaacgggccattattcgagaatattgcaagaatgtaggactggacagtttgaacttttaagaggtatagattcaagtaaagaccaaagctattacctgtctcaagtgaagcctgatataatggaccgaacaattctacctattgggaatttttataaaagagagattcgtcagttagccaaagaattacagttgccaacagcagacaagcctgattcgcaaggaatttgttttgtcaataattcgcaacgggggaaattcaagacgtttttaaaagagtatttgcctagcaagcctggacacatcattactatagatccacagtctggacacaagaaagtatggggggaacatggtggattatggtcgtacactataggtcaaaaagtggggatacctatgccgcaaggagaccctgaatatcgtggaacatggtttgtctctgataaattaagggatacaaatgaaataatgatagtgcgtggaagagataatcccaaattgtttagagatcatgttaagattattgatatgaaatggttatttccagaagaggatttgatgaacattgagaaaacattacaagagggaatacaaagaggtgatttatttttacaatatcggtcgttgcaggagccaatattagtagataaatatgaattatggaaatctgaccaggccacaaatgacaagaatcaatatataaaccaaaggaagaatcaaaggaagaatcttgaattcattctgacattaagttgcccccagagggcaatggctccaggtcagtatggatgtctctatttaaaaaaccgtgtcattggtagtggtacaataatcctataggtattggaaaggtacataagaaacaacaaaacagtaaaaaatgggaaataaacaaaaaaaaaaaagagaacaaacaaaccattcataatcagccatgaaataaataaatataccacataaaatatccatccaatcatatatatagctgataactaaatacttgttatgtttaaatgaacaaaaataaaaaagtagggatacattattacccattatgtatggactgacacatcatgcttactaatatctttttcatttttcatttttttttgccaattccggttaattgaaacaagcaaaataaaacaaaggcaccatccttcgtcgaaaatgacagaaaaaccagtgggatgctttttctgtttttttctatcgaggggaagaaaaaatatttgcgaaattgcaatcaacaacaaaaaatgaaaaaaaacgaaagaaaaacgaaagaaaaatgaaaaatgaaattaccccactattttgattatatccacccagacacccgcccacacccatacacacagtctattattctctttctgcatttccttattaaataaaaaaaaaatctgcagaactttttgttattccggagagcctaaaagtgctaaagaaattttactacacttagtgatctcgttgacagggctattttattcactttaatacaacctgttactactactacaactactgcacttacacacatatctgccagatagtcactaccctgtagaaactaacctaaaactatcaaaaaacaagaaaataaccacaaacacaaacagtttttatttatttatttatatccattttccccttctttcttttattttttattcttttgtgattctaatatatcccataaataaagttatttagatcaaaaagaacatatttatttgtatagaagagcaataaacaaacagataaataaagagagagagaaagaaaaaaaacaaaaacaaaaagaggacatcttatttctacaaccttctgacatattttaccccaaaacatttcatcagataattttttctttttctttttcttctttttttctttccaattctatccaccttcttttatgaaaataatctacaataagatatcttactcattccaactccatttgttcatactggaaatactgagaaatagatttttaaatataccttaatcgttgcattaacaataaaacaaatcttacaaatccatcaaaaagtatctggtaaagaaaaatcacacaactttaagaaggggaggggggcagaaagcccaagtaaaaatttacattaaaattacataaaataataataataataataataaaaagataaagcattctactgacagtcattaatactattaaaatgcaacaaaaattaaacacaactgcattaaatatagcattgggtctacctggaatgtcttctgtcttcacacccagtcaattattaaaaattagaatcgtggctgtggtatcttctggtctttcgtcgttcgtcggtatatgtgcaatatatttattatataactatgatcatagaaaaaagctgtttagacatgaactgatttcctttttgatcatttgtgatttcaccaaagctttaattcttttactttatccaatcatcctacttattaatagaaatacctttgcatcaccacccatgattcatactttgggttggtttacacaatttgctacggaaggttcagattttgccattggattcttctcaatacattttgctttactaatctttaaaccaaattggaaatggagaaacaaaaaaagtgggaacatggaaggtggcttatacaaatatagacattttatatggccaatcactctcttaatccccgccatcatggcgtctttagtgtttatcgactttaatgtcatagactacgtggatctgtcgaaagtaaacattgtcaatgatgataaagaatataccaatcattttcgcccaagacgtggtggctacaaaccatggagtgcttggagttatcttcctgcaagacctctatggtataaatatgtcttaagttggggccctaggtatttcttaatcctgatgattataacaatctatgcatccatttacatctacgttcatagagagaccaagaaaatcaaagatcaattccgattaaataatggagtaattgacaaccagaacgaagattcgaatgaaaatgcttcactgacaaaaagatacattattaatccactttatagactcttccatgtattatttttaattatcacccttaacttagatttctccaatgatgactcaatggattcaaaaagatcatattccataaacccaatttctaaccaaaataacattcatcaaagtaataataacaacaataattcaaataaatccttacatttaattatatcaaagaaacaaaatactagaaacaatgaagaagatgaagaagaagcaatatctttagaaacctttgatttcaatagtatgactgcaaccggtaataaaagtaacataatagaatatccacaaaaagaaaatgaaggtgacgctctgactagtggcaacgacacttctattagtcaagatgtctcaatagggaaaatcacatccaagattactgacaatataaattcaaactcatccatttcaacaaatgagaacgacactgtgtctacaggaacaagatcacatgaaaacatgtttgctcatagcaatgaggctatgcagcctaacaatacgatcaacacaaatcaaggaaaagattctgataataccgtcctcaatatatccgatttacaaattcaacttcaaagagaaaattatgctgccatgaaaaaaagaagggcacagattcaaaaaaatttgaaaatgatcttcatctatcctatatcatatatgttggtctgggccttccctctctgcgcagatatttcacagacacatcatgaaatggtgtatggaccaattttatggctgacatatgtagaaacctttgttcgttccatgagctgtcttgtgcattcatttgttttcatctttaaagaaaaaccatggcaatattcttggaaaaaagtccaagagaaaattttaatggataaatatatgcttaaaggtgaaattggcgaggaagagatgctgaatctatgtcaaagtaaattaggaagacatggttggtattatagatcgacatggagaaaaaaaaagtgttggaaacatcaacaaagttcacttaaacgtttcctttggtatattgttagattttttagaagaattttaactttcaaaaaacctgatttctatgacaattgtaatgatgaatcatattggaaaaaatattattatttggataacgatgctggccatctgaatacatgttcatattcttctcctaattccggtttaactcctaatgttagttctttaataaatcataaccataatgacgatcaaaaaacaattccagaattaagtacccatcatatcgaacattttagtaacacaaaaaatttttactacgaccaaccacagagagaattaccatctgagatttctgttccttggtattggaaaatgttacatcttttacctttattacaagggatcgacctagatgaattgaatcgattagtaaaaatgaaatatactagcggtgatgatgattttatcatcccagggttgtcgtttgctttcaagtccactacaggctcaaaaaataatgcgactactaatattccacataatcaaaacaacttctctttaaataaatcaacgttagagaaatcatataataacaagaactatgaaagaagaaatagttcttccattgcttatcatgtcaataaccatactgctactgtaaggttgaataataaccaaaattacaaaccatcctcagatggaccaaatgaaactacagaagacaaggggaaaatggatcttctcgcctttttaaacgatccctcaacgcattaagactttattaagaagcttcttttattttaaatatatgtatcatctatttcacattatcatcaactaacttactgaactaatctttaagggacattcaaaataactctacatcatttaaaaaaacatattactgttttatttgcataaaaaatttttttacgaaattttgaaaagacaatttatgattttcaatctttgcttttcttcatatatacttgtgtattactttatatacatttaaattgctcacatataataattaattctaaattacaaacatattttaatcttcatctccttaggtgcttatgacaacgtcaaaacaaaaaaaaattgctcattatattatgaaggtcatcacaaaaaaagaaacgaaaataaaaataagattaaacttaaaaagcaaaatcaaaataaatttatataaaaaataaaaatgaaaggcaatttagacacatgaaaaaaacaatagaagatctaaaacttaagaataaacaaaccattccttctcccactacctaatcaacatatagaaaagatatttggtttgagaatatgcttatctaatacacgtatacctcctaatttttttagatgtcaaaacagcgtacaattttaaaccaactaaacaaatttataaccagcacaccaatcaaagaaatgaaggactcttcagactttgaatctcaattaaataaggaaattataatggcaaagaaaatccaagaaaacaaacacaagaaaagaaaagttactgataaacaacttcgcgatcctaatggtttcaaattacgtattaatgattccttaagtgggaaacataagaataacgaccctgattatgaagtcaaaattgaaaacaatttgagaaaaattgagccatactatttcacttataagacattttgtaaattaagatggagagataaaaaattgttagatgtcttcaccaatgagtttagggatagaagtaaggactattataaggaagccattgaaaacggttctgtttatttggatgatcaaccggctacaattgatagtgtgataagaaatggtcaactaattacacataaaatacatagacatgaaccacctgtcactgccaaacaagttaaaattgtgtatcaaaatgatgatattgttgtgattgacaaacctagtggtatcccagttcacccaacaggaagatatagattcaattctgtaaccaaaatgctagaaagagaattaggtttcaccgttcatccatgtaatagattagataaacaaactagtggattaatgtttttggcaaaaacaccaaagggtgcggacgaaatgggagatcagttaaaggctagagaggtctcgaaacagtacattgcaagagttgtaggggaattcccagttgaagaagtaattgttgataaaccattaaagacattagagcctcgcgtagctcttaatgttatatgtgaagacgatgatccagatgggaaacattccaaaactgtatttaaacgtataagttatgatggagaaaccagtattgtaacctgtaaaccattaactggaagacaacatcaaattcgtgttcatttacaatatttaggttatccaattgccaacgatccaatatattcaaaccctcatatctggggtcctaatttgggcaaaaatagggaagcagactatgcccatgtcattaaagaattatatgaagttggcaagaccagacctgcacaaagctggtattatccaaatgctcaaggtgagtctttaagggacgaaaagtgctctctttgtaaaacagatctatacacagaccctaatccagaagatttaattttatggttacatgcatacaaatatgaatccaatctatatgatgaacatacagggaaaaagaaatggtcatatagaacacaattccctgattgggcacttgtacctcataaaaaatttatagaactagctatagagcaagcaaaaaaatgtgaacctactactacagcatttaatgttggtgctgtactagtcaatggcacagaaatattaggaacaggctactctagagaattgccaggaaacacacatgcagaacaatgtgcattagaaaaatatttcgccgaagttggaaagagagatgtgcctccgggaacagttttatataccactatggaaccatgctcattaagattaagtggaaatcagtcttgtgtacaaaggatattgatgcttgatggaaacatccaaacagtgttttttgctgtctctgagcctgaaacctttgtagagaacaatactgctacttgcttatttgataatgcaaatatcaattatatcaacattcccggatatgaagatgaatgtcttaagatagcattcaaaggtcataataatgaagaaaaatagattacataaataatacataactaattgtttagtagtaatccatagatatgcatttacatataccataatatttaatattgatgttacaaagaaaataagaataaagcagatcattgtttttattttttctttggaaattgtcaatctgatacatccttgataactttctacctactagtattcactagacatagtctctaacattttatggagatcacctcatcttctcacttattcctggactccaaagaatacaatgtaacatgttatgataacatataacaatatatgtggtgtattgatgtaattgtcattgtcgttttaaatgatctaatttctttcgatttcaatcttttcaatttgtctctcgagaaaataattaaaatcagtgaagaatatgttataataatacatcgaccataggcacattctattggattcttgttaactgttggagaaaagtctgactatcagatatccaattgtgacatccatttaggaggagtaaagtactcaattcattatgtcaaggagaagaggaggagtcaaagctaaatcagcatccaagtctacaagtaagtctgtggtcaaaccactgtcatcaaaagataattctcacttcctagaagctctaaaactttatgaaggtaaacagtataagaagtcaattaaattactagatgggatcttaaaaaaaaatgtgaagaatccagacattctagccttgaaaagtttgaatttacaatttcttggtgaaaagtcagatgcacaactatatgctagtcaggcaatcaaattaattgagggaactgctgcatctgctatctgttgtcatgtcttagggatttacatgaagactatcaaagattatccagaatctattaaatggtttcaagcatctttagataatgggtctaccaaccaacaaatttatagagatttagctactttacaatctcaagttggtgattttaaaagtgctttagtgtcaagaaaaaaatattgggaagcctttttaggttatagagctaactggactgctcttgccgttgctcaagaattgaatggtgaaagacaacaagctgttaacactttatctcaatttgaaaaattagcagaaggtaaaattagtgaagctgaaaaattcgaacatagtgaatgtttaatgtataaaaatgatattatgtatagaaatgctgggtcgaacaaagataaattggagaaagtgttgaaacacttaaatgacatcgaatcaaaagttactgacaaattttcgatcttagagagaagagctaacatttttatgaagatgggtcaatttaaagaagcttcattggtctacagagctttaatcaagagaaacccagataatttcagttactataagttattagaaatctcattaggcattaagaataataataaactaagaaaactcttctatgaaaagatgaataaattttatccaagatctgaaccaccaaaatttattccattaacttttattcaaaatgaaaatgaattatccaaaacattgagtgagtatattattcctcagttaagtcgtggtgttccagctactttttctaatatcaaaccattgtatcaaaagagatcaagtgtggttcctagattagtcataaacattgtgcaaaagtattttgaatctatcaatgcaaatgaaactcctatagcatatatctggacttgttattttttatcacaacattatttatacatgaaggattttaataaagcacaagagtttgttgtcttagccattaagcacaccccaaccatggttgaattctatatcttaaaaggaagaattttaaaacatcaaggtgaatttatcaaagcagcacaaactatcgatgaaggtagacagttagatttacaagacagattcattaattgtaaaacagtcaaatactaccttagagccaatgacatcgataaagctgtcgaaattgtatcactcttcactaagaatgagaattctgcgaatggtatcaaagatttacatattgtcgaggcctcatggtttattattgaacaagcggaggcatattatagattatattcagacactgtgagaaaattagaatcattgaacaaggaattggcaaatttgaacgacaagagtaatgaagatgaaaatgccaaaaatgcattgaacgaaaaaatcaaaacttgtaagtgggaatgtattaaatataaaggtttatctttgaaaagatttgtagctatatctaaattctatcaacagtttgaagatgataaattagatttccattcatattgtatgagaaagggtacacccagagcataccttgacatgttaaagtggggggacaacatttatactaaaccaatgtatgttcgttccatggaaggttcatcaaaaatttactttgatatggatgattcattaaaagaaatgcaaaataaacaatctgataacgaagatggatcctctgctgctgttaaattgagcaacaaacaattaaagaaggaaactgcagcattaaataaacgtaaggaagaagagaagcaaaccattatggcatacaacgaagatcaagataatgacccatttggtgataaaatgattcaaaccaaacatccattaaaggatttctatgataaattctaccagaaatataatgagcaagtaagagatgatgaaaaggattgtctgttagattttgaatatcactatcgtgatggaaaattagcattatgtttagcttcaatgaataagttaaagacaagaattactgatgcaagcaatgagaaatcattgacaatccttgctataatgacgacaattttgtctgatgctagtcaaaatcctcattttgatgatattgcaaagaaggttgcaattaaaggactagaatcccaatacaaagatttacttttattaggagatcactcagacaatgctggtaaagagaaatcttccactctgaatcgtcttattgataaatatcaagatggtttaacaaaaaatttaattatcttacaattcatatacaggtttccaacagtattcgattcatattctgtcaaagaattgatattgaactgtgttgccacattggatccaaacaaacaatttgaagtattgcaatatgaactttaagtaatatagaatataccaaacgtcagtaagaatgggtagcaacccaatgactaagatatattttataatcttgtcatacataatatatagacatatataaacgtatacgaatacaacataattattgtatatctattacacataccctggacttatagtaatagccatagtaataatggtcaacagatacacaattctacgtctctctgcatcatcttcaaaaaatatatatttagaaaagaaagaaaactgtatataatctgaaaaaaaaaaataattaaaacttgtgtaatctctaaagaagatgactcatcatgaggaggctattgaagaaaaaaccataaatacatatccagatacacgtatacataccaaaatcttcaattttatttatagagttacaacaaaaacagagtaactattcaaatagaataaaaaaacagcatatatcttcatatcaactaatatctacactacactaatcactgtccatggacgccattccagaatcattatcatccgccgttacatacaccaacaatataatcacaaacgataatactatagctattaataatacctctaacaaaaccatgaacaatagtcagagtttaccagttgatagaaagcggagagataacattaacgaaagaatccaagaattactaacacttataccaagtgaatattttcaagaatattacgctactagtaacaacaatagtagtaactccgccactccaggtgctatcagtggggcaaatagtggtggaggaacaggaagtagcaatagcgaagattctgcagttggcacacctataagtagctttgggaccccgaaacctaaaggtacaggcacaagagatggaagaccaaacaaaggacaaatattgacccaagcagtggaatatatcaataagttgcaaaatcaagttgatgctaagaatagggaagaagttgaatgcatactgaagttatccaaactggctaaagttgcaggtgttaaagtaactgatattaatttggaaaatacaagtgctgaaatagaattaggacgtatcggtgttggacctttgggtggttcaacaacttcatgatatatatggataaacaggaataagagattgcgtaatgaatatcgatgtcaactcagactgcctattatcttataaatatctgcgcaaaaagaaagaaaaaataattttttttcttttatataacacgcaacagaacataccgcctcaatgcatacatgatctattcatactacttcattagaacatatataaacattctttcatctataccctttctctttctatctatatataaacttctatattttattagcaaaataaagaaaaaaaaattttttttcgaagttataaatcaaaacatctttctatattgatcaataacgaaggagtagatcgatctgaaaaggttgaaatgatgattattagcttttcacttagattattaaccaacctatacacctaggtacatctacatatttataatcgtctgtgagtgattctacatacatacatacatacatacatacatacatatatatatggtggcgttagaaacaaactaataactatgatcgaagcaagtaatattccaacagcgagccaatccagtaaagcctcaaatagaacaaatggcaatgaagaaattgcaaagccagcagagaataatcagtttatatcaaaacctgtgacccctatcaagccaattggtatagctaaaaatgttgttacaggaaagtatgtattcccagatattaataaagaagacatatggaatgcaagaatgtttctaaaatattatggtgttagaacatttcttgataaatacttaccaaatgaattaaactctttatatctgtactttttaattaaattgcttggatttgaatcaaaagacagagttttggttagattaattcagcaacacattgaaagctctgtatcagaagataataaatacagctatacagatatcgatgatccattggagaagaaatatacagtgaagttaattaaagatttgcaaaaggcaatgaataaaatcctggcaagtagaatgagattactaaatttctataacgtagatcattttgttgtggcactgaaagaggccaaaaacattattgtcttgactggtgcaggtgtctctacttctttggggatccctgatttcagatcatcggaagggttttattcaaggattaaacatttaggattggatgatccacaagacgtattcaattatgaaatttttacgaagaatccatcgattttttattcaattgcaaatttagtattaccgcctgaaaatatttattctccattacacagttttatcaaaatgttatatgacaaaggaaaattattaagaaattacacgcagaatatagacaatttagagtcgtatgcagggatcccagaatctaagctgattcagtgccatggttcatttgctactgcatcctgtgttacatgccattggaaattacctggtgaaaaaatatttgaaaatattagaaaagttgaattgcctctgtgtccatattgttataagaagagaaagaagctaatggacttgaattataagggtcacactaacattactgacgataataatactaaggaaaaagataacagtaccaccaataataacaatgacagtgacaatgacagtgacagtgatgactggaacatagatatcgatgagactatgttaaaatcatatggtgtattaaaaccggatataacatttttcggagaagccttgccaacaaaattccacaaatctttgagagaagacgtcaacaagtgtgacatgttgatctgtataggcaccagtttgaaagtggcaccagtatcagagattatcaacatgatacctgtaaaagccccccagatattaatcaatcgcacacctgtgaaacatgcatcatttgacttatctttacttggcttctgtgatgacatagctacattagtggctaaagaatgtggatgggatatacctcatcccgaatggaacaagtataaaaataagacttttacactcaaagaaaaggaaagaggtgtttttaatgttactgctacagtgtgactctagtacatagaaacaaacataacaaagggacaaagaaacaaacagatatccaaaaataaaaaaaaaaaaactcattgtatgaagatgtatataggcaaagttgtaaataatatcttcgcaatgtatcgtgaactgaatattaattatggtctctatagatggagtttcttcgagacagaccttcctttttggtgtcactggctaataattggtattctatagctacatttctttttcttcttaattttattttgtattgtggcatctcttttttttttttttatctcacattcttctcttcgattcttgtcagcgtccaaaaataaacaaaagaaaaaagaatctttcttcttttctacggaaaataaagtcgtgaggcccaaacagccgccgctgtgttctcaaaagcattgaactatcatcacaaacactcaaacagagacacagagaaagagagatacaaatatggatatatgcggatgactaaatatacatgcttctgaatgcatatacgtgtattgtgtaatattattattattattattgcgcagaaaacagaaaacagacacaaaaactaataaccacgacgcagattcgtctgaacattttacttacatactcgtcacatatagtaacagtaatataatggattatcacaacagagcaggttctaaaaaaggtggtggtgggatagcaactgactcccaatttaatagacaaagacgtcaacaaatagaagaattattgagtggagacagtaacattccattcactttccaagaaaatgaaatatccaccactgtcccagattcaagtaggcaaaacccgtatatctataagaatcactcggggaaattagtatgcaaattgtgtaataccatgcacatgtcttggaccagtgtggaacgtcatttaaggggcaagaagcacggtctaaatgttattaggagaaataatttcgttagtggcggtggtattcgaacaagtggaactacgggaaacattgaagattctaagatggctttagcatttcaaagagaagttgagaccatgagacaacaattaaagtatgataaaggattacctaaggttaatcttgtcagtatcaaagaccccaagacagataataaaggtatttctgttagaatcatatatcctaatgagagtcaaatacaaaaagatgaaagtgaagaaaaagtaaataacgatgaaaccaaagagtcagtcactcaacaggagtatccacctttcctaagagtagttaccggtttagagttgtcgagttctaaagatagaaacaagaaatttttggttgtatcttttccaccatttgaaaatgtagccattgaaataccttcacagagcaatatagttggtggcaagaatctaactaacgataaaaataagaatgaattcactgtatacgtagatgatttgaatcatgattgtacgttgtgggatcctgatagtcatactttctttgttcaatgttattttctcagttcagaaggtaaaaaatactaacaagaaaaagtaactaaaaaaattaaaaaaaaaaataaaaacaaacaaacaaaccaggtggtaataaaggattttgactgttatgcatttctactgttcgattcttttaataatatcttaaagataccatctaatcgtttctattttcaacacaaactgactgcaaaaaaaataaaaaacaaaaaattggcactatcagaagccagatcagatgaccgggtaacctacatattatcctgctttctgcacattatgattttttttttttgagcgtgctgtctgaattttctgaatctttttcctgcggaccgtaaggtttcgcaatgtggagatcaaagaaagaaagaaagaaagaaagaaagaaaggattttgatccgatctaattcgattcgactgctctgtttatacgtttatttcttatcatttgttgcaacaaatgatatccattactaataataacaacgtacagtacttttgggttacttcttcttttttatgtgcatttcattttttttttcttttcttggggcagagagagggaaagagaaaaagtaagtatattatcctgtgacaaaaagtttcaagcaacagtgattgcaaaacataaaataagttattttctcaagttgcaataaacagtactattattgtctccaatggatcaaacaatattagataaaatcgattctgaaaaatcccttagaacccaagcaagattgtctgctatgattggatctctcggagacattgatgaggtaacagacgacactaataactcaataaaagaggatcaagaataccagataatcgattcttcttccagttccacttctgtctcctcagatcaatttgaacccttaagaccaacacaattgaattttaattcaaatatacatactcccccagatcaacagcttccatcttcgttttcttctaattctagtgagaataaagaactctcaaataataacatcgttataaataataataacaacgctatcaatgatatatctgattttgttccaaaactaccaccacactctcaattccgtcctttaacttctgttaacatcactccatcgattacaactccaacacatcatcctaataccaacgatacaagtctcaatcgatatagcatgctttctgattattcaggtgtaatccatgaaggtactgaagtttcctatatagtgaaaaataaacctgccaacaataccgacggtaacaacaaccaggaccgcaacaacaatagcagggacattaataatgaagttgatacaaataataccattataaccgtaacaacaacagataacataactgcaactgctacagctactagtgacgataaaaacaacacatttggttccaataaactttccacatcctctcaaccaatagctcaaaatgaagtaattattaaacaaattaaaaacgcaagacatgtgaatagattcaattcattacgttccgatactccaagcaaaccaccaaaaagtcatctaaagtatcattctgatccattattattaacacaagaacagactagagaacaattgaactgtttatccttagaagaatcattgcctagtatgcttcacaatcgagaaaaatctgatttagatgattcattttctattcagtctagtgtgattcatccattatcaactccaagtaacatacagaatgataaagcaaacaggccagtagaacccttattgaatgagaaaggaggaaacaaaactaccatatacaaagaaagtatcaataacattaatcaagcaaacgacggtaataccattctaaaagctccaccaagaaataaaaatcgtcctaaaacgatgattatagaccaggatatatcaagccctgaaatatttttaaaacatgattctgctactccagataacaataacaactataataatactactacccttgatagtagtggtaatggtaatagtactaatttaaatagacagcagtttaatgtacataccctgtcccaattactgtccatcaccaatgggacgttaattggatcggagttccaagacttacctattcctttagaagaaaaaagagcattagaaagattagttgacagtttatcgaggcttaccgcagatatggtattggaccctgaacggtatggagaaggtcttcaaagattgaaaagagcgatcagagccttagaaggcttccaataggcacaaatatatacatacgtatgtataagtccctacaaattagatcctatagacaatatttataccagacatacacagttatatagaaatacacatatacttctatcgaaatgatagctcatcatatatatgtgtatacagatacatataaattatattagtcctacactagggactattgaattgccaatatctcaaagtacctataattaattctagaaatttcattaaacaggaaaaatcgttaaatagtaataaaaaaaatagaagagtgttaaagttgaaacaaccaatggaaactcttctcttagcaagtaatctacaaaggagaattgcatatccatgtttcatagaagtgaattgtgtatcacttataagaattagataatttataataaaaatatatattaagtgatattgcaactagttgacacacaagcgaaatagtaatgttcttaaagcattataatgtcattaaacctcgcatgctatatatacggcatgttcgttgtattcacttaaccacaaataagatgaatcttctaaagaaatcaaagatcagtgagggaccgtccttacaagaaaacactacccatgatccggaaactaccagaactcaagataataaacataagaataatgataatgggagtattcaggagcgaatgctatttaataaagtgtttgagagtatggaactaaagagagaagagaaacaaaaagaacctaacactaccactagttatcgttccaataatgaacctgtccacatagaccaatcaacgggggagagacagcattacagcattaataatattaaactaataccaaataacaataataattttcatagatctagtgatgatttaactgtatcttttggtaaatacgatgatttgaaaatatttcatgatgaaatgaaccaggaaccattcgatttccaagattccaagattaattcattaatatcgaatttttccaaatctaatataaagaagactgatatgaggtcatttgtagataaattaactagtaaggagaatagtaatgaaaatcgtagtaaaacattacaatctaataataacggatttgagccaaattcaaaattgcaacctgaattcgagttaccaatttttaaatttttagatggaattgaacatgaattatctcaaataaagaagaaaactttagaatcaacaacagagaacaaccttaaaaattctcttaataggaacttcaaaagaaatataaaattaacggaaactgataaaaaaagaattatccgtgaggagatgtataaatcagaactaaaacgtaccttgagtccctacttgtcctaccttaatcaaaatgttattaaaagcgattatgatatgtggaagtattttgaattgttgttaacaacatatataaatagagataaaggacaaagggaaaaattattaaaattgactcctgaagagacaatcaaacatattgaccaagaaagtactaaagattttacaaagattcccgaaccatatgagatcacaatgccttgtatagtattagaattattgacaaatgagacccaatggcatttaccagttgaaagaaggtatcagttaacaatgtatatctacaatcaaataaagacatatccagatatcaccatgtatttatattttggaacagtagatttttataatttattgattgaattgaattggattaattacaaagatattgcacagatccgtaattatttgattgagatgcaaaataatgggatccaaggtgatttgactaccttagaccatttaaacaagattatcaccactatgagatccttaaatgatgatataatggattctgaggattataataaattaaaagaagatagtattacaatggatgttttgtggtccaaagatatagataattctattattgaattagaaaaccgttcacaaagactgaaacgtcaattggtaccctgttccgtatagtgacaattaaacaaaaccaactccaacatactatgcacaggtcgatcgatctaaatacatctaatatgctggatacgtacaataggaacataacatttgatttattctttcactcagattaatataaatatttcttgtttatagaacaacaaacacacaaataaataagtgaataagtaaacatttcatagataaacaactacaatacccttttttgcttcttccaacctattttagttgtctacatacttgttccataggtcaatgattcattatcaaatagatatgacagacgataatgatctgataaaacatcgaatgcgctatcaattaattgtttttttctctgactttttcgttggtacaatcggttataacaaaaaatattggtgatatataatcctatggtagaaattttatttatatgataacagtgggtgttgattactaattatgatagtaaggcttatttttcatttcatcatcaacacctcatctagcacattccatctgtgtcgaggtattcgaaatagagaataaaaaaagttttttttaggaaaaagtgaaaatttgcctttcaaatactatgcactagactaaaaaattacacagctatacaaaaataaaaaaaataacgttagagaattattataactagccagagatattaacactttcttccaattagatttgagttttgatatagttgaaagaaagtaactatcacagaataccaacaaataataaaaagaatataaataaaaagaaaccccaataattagaatcacaatgtcattaggtgaagtcgcagaagtgtgttataatataacgagttcattccttcgacttcaattaaatgcaacagagataaccaaagaaacacaaagggcagtgttaagaacgcgtcattatttcttaaacgatatttttccctattggaatccattaaacaatgagatttcatttgcatacaatggtggtaaagattgccaagtattattattattatatttaagtgctttgtgggaatattatatgattcaaatatgcacgtcacaatatgagccaaaattccatagttttccgttaaaaaaattgccaacggttttcattaattcaaatgagaccttccctgccttggaatcatttataacaatgacaacgcaaagatatcatttatcgttgtatgaggataaacaattcagtggttgcagtaatgatatggcgacagagtttcaaaaatacctggatttgaatcctatgacaaaagcgattattattggggtaagacacagtgatccacatggagatatgttgaaaactgtacagatgacggattccaattggccacagtttattagattacagccgctattagaatgggatctagctaatatatggagtttcttactgtactcaggtgaacctatatgtccattatataggtatgggtatacttcattaggagggattaacaataccataccaaatccatacctgaaaaaacaaagtaatagtaatcaaaattatgataaagatttgaatgataccattaacaatttccccttccaatatgagttaaataattcaataagaacttcaactcaatccaattcaaaaagatgggagactgatgatgctgatttaatagcattaaatgacaaatatttacctggctggtacttaattgatgattctaaggaaagagcgggaagaataaaaattcataaaaacaaaggataatattgtagctgaagaaagagaggagagaacccacatccatatatacgtgtatgtatgtatttgcatctcaacaagttttgtatagattttacatttcaaaagatacaaaaacaggaatgttaaaacaaaataaaacaaaacgagataaaaaaaccatatactagcattagtaacaatatcaaatcaatgggagtattacatacattttttatatatgcatatgtatgtatatgtgtatatatacaagagttcaaaaagaatattaaatattcgtttataaaaatattgagagatgtatgggagatacttgaaaagtttaagaattagaaaataaaaaaaaaaaaattatatgtttcagtcatgaggtttcccatttatcatattatacaatctggctgcatgataattgatatttgatctaacttcttttttctttttcacttctttcttacccttacctccattcatcgccagtccttgattcatactgcattgtttaaattcacggaccaattgttcacacactgcactatcttgaccatttgaagaccaacactgcagtaaatttgacatcaacaccaaacatctattcatctcttgtctaataacgggttttttaactcttaaacgaggtaagggtggaagtctatatgttgttggtctaccactcatgtctcaaaaaattctttcaatggatatatatttataccgacttctttgtccgcttttttattttctctttctatttggtcttgttattttcttccacaacccttcaacttaatgaaggtgataaaaaagaagaacaactagcacgcccttgtagtacgcttaatgtagcttctattccctcgatctttcataactttgttagttcttctaatccctctttcttttttttttcttgtttttatttacttaacttaaattcttagatttattttttttactgaacacgtgactgtatacacccatacaccaataattctgcagatttgtggaaaacgagactgggaatgtaaactggtagcgccataaaatatgatgctgagactgtgaaacaagtcgcaacattgaattttctattgttctagatgtaattcaacaacatgacctaaactttgttaaacaataattaaaatagatccaataattctatacatatgtatatatcagataatagttaatagataagaccagttttggaatacatatagtgatagcaacaatttagattagcatagtagtgaacaaagcaatacagaaagaaaaataattcgtaacaattttaatattgaccaactgatattaattaatagtgctttaatataacttaaaatgatgtaaagaggatcaaaaaataatgatagtgataatagttgtcaaaaatacagataaaaaaaataaatatatatacattcaattcatcgaaataagaaaatcaccagtaagacatgttaataatgagttgtcttgtgtgtaagcccttgctataaaagtgtaacgacccacaggaacttctttgggtatttttactgtcttaactatcttatgtggtccctttgagacagggcacactattggattctcatccttttcatgtttcatttccatcatatgcttactatggacactcttactttgttcttgtcttaaaatatcacataagtcaaatctctgtgtaactaattttatgtaacctaacttcacttcgatatcaacataactgccttctaaaaccgaatccaataatacaccagatgcttccaagatcaattccgagcctctagcaggtggattaggtgtcaaatcgatattttctattattaacgcttgcgatgtggttatatcacatacttcaataggcgaattacctggaataggcttacttggtggtctgtttggttgtaataaaacttttatatcagatcctagagttaaagtaatgaaaaaggttgcaataacaacaaacaaatttaaggaccttaacaacatcatttatatatatatatatatatatatatatctcgttgtgcgtatttatgtgcaattgaaagttggatatagtgtagatataataagcaaagtgatatgaatctgtacattgcctcttgtacattggtacattaactaaaagttcttgttgcctctccctctacttttgttttgttttgttttgttttattttgtttcgcgttttctctaaacagagccgctatcaatattctacagatctctaagacacacacccttcaataaataaacatcacagagaagattaaacatatgttattttaaatatacattagagatacaattaaaatttatttactatatgtacgtgtaaaactacattatatatatatacattttctaatatcttgctaaaacaggaggaaaggagagataaagagaagaaaagtgagggaagaagtgaattaatcattagtaatcattagtaatcattaatgcaattgataataatcgaggataacacaaaaaaacagaaaaaaagaagataagtggataacgaagcaacgagttcttatcaatgtattattaacattaacatttcatgtatataatattttattggtgaactcataggaaataaccggctctttggttcccattaatacctgaagtagtggatgtagcaactccattaacatcttgttgtaaataatcatctggaacagcagaaaatattttaaaagttggttctaagtcttcttctactttcatcacactggccacattcccacatctataacaatagtttggcgcagaccagactgttactacatctttctctgggaaatgatatttaaaaccttccataactagctgatgtgctcttgcaatcagattcaaaccgttaacatgattgaattcacgtgccaccttagacccgaataaccaaccagcaccacggggactaacttgccatgcttctacgttatctggatcactccataaaagatcagaaaacccaccttcatgtggaacttcttgtgcacgagacaatactctgatttgatctaacattctaatttcaggggataaaccaccatggacacaaagtattttaccgtcaatgatagcagctaaagtcaagaagtcaaacacctgacaacaatatttccaaactgtagttgacccatacttatttagacattcctcgtagaacccataaacttgagtaatctgtcgagactcatgattcccacgcactaaagttattctatctggatatttcactttaagacacatcaataaagtgaatgtttccaatgagtaaaaccctctatctacataatcacctaaaaagacataattaacttgatcgggaaatccaccactggttctaaataattccaatagatcatgaaactgaccatggatatcaccacagacagtcacgggtgtcatcactggctgaatgttgctctcttccatcagtaactccttcaccatttcacataactgtttcatttcagattctgtcagagattgacatttttttactgtttctaaccattcatctgggcctgtcatattatattaagttctatttatgcggatatgtgtataatgccaaatagtctttgtgttacctataaaaaaaatatgtgctggtgcgtttatgtatgtaatcttattaaagtgtctcaatgtggttaagtatcttgttcatctatatatactaatcactatatttgcagaacaatcaacctcttatcaacttacatacctaactctggtagattccttcttgcacaacttgtagatgttgatttgctcaatgctttcgattgggagggaggcgatgtcggtgttacaatttaggaatataatccacagaaaaattttcaaacttttccaaagtcacataataatgaaaacacagacaaacacaacatatacacataaaagcacatatacacatatagaagcacatacatatgtgcattggtatcaaagtgtagacgtgaacagtactaagcaaaataaacaaacaaataaactaataacatcctatattaactactatctgtaaattttcagtaatcaactaaaaacaaacaagtatgaaattagtgaattttttgaagaaattaaagaatgaacaagttacagttgaattaaaaaatggccaaactgtatttggtacgatatcgcaagtgacaccacaaatgaatgtaattttaaataatgtacaattaaaagatggaccatctagaaggagtgggtatgcagtaaatcatgctagtacatcctctgcagcttcgaccttttcatttcatgtcaaagataatgcagtaaacttacagtatattaatatacgtggaaacacaattagacagattattttacctgattctctaaatatagatacgatattggcatctatggacaataaagagttgaatcaattgaaaaaagaagggaaagtgaatcaagtatctacaggtcataaacgtggtagatataatgataatgatactgacaatctggattcacaacaacctaatgcaaggcaaagacaaagaaggatagcaccaatgagagcacaaagatcataaaataaaataaaataacaaaacaaaatagaacatagcaaaaaaaaaacaataaagaaagtaactcacccaaatcaaatcattattttaaacacacctctctggcattatcaacaaataaatcatttatttatttatctatcaattcatctctttttctttttttctctcaatatatataaagagatattatattcgtatatacaagtaaagaataaataactagatagaaataataaaaattgcaagtatgggactaaatgatacagctatatttataaagaataacacacaattaaatccaagtccttgtttttgcatttgttttattctttttcttaccctttgattttgttctagctttagacaaaattgaatcgatctcttcatcagtttttatggtacgtggttcacgttcatgtttatgtaattttggccacaatacacccttcataaaacgttttctttcgtacttctccatatggaacagttttacaggttgccaagcaggtaatagatcctcgataccgtatcttttagccaatttaacgatgtctgacattctacgacgagaatagacaggatctctgaacttacccgtcacaggattcctatttgataagaaggggtttgcctttggggaagtgatgtctgttggatgagtcaaatatttgcttctacctggaggatatcgttgaaaaaagtttttcaactttaatggtaatgattcaaaatagcgtgtactgctgctcatgttgttattttgttttatttatttatttatttattttccttttcccacagtgtataaactttcttaaccagttgaaacgtacatatgcatgcatacacttacgtgtgtatctatctgtatagtttatatgtacatgcatatctgcttatttaaacggatagataaccctttcttatcgaatctttccatcgaaccgtttgttagccctttgtggaaattatttctctaccaaaacaaaaaattcttcctcgagggaatcgaaccaacaaaaaaatatatatataatacaaaaacggaaagtttcttttcttggtaatagttaccactctaggaaaatgtgctgttgccatgactacgatttttttttcatttctatctatttatttttctttatagagagatcacaactctaaacacaactcttaatgctatatattaccatcatttaatatttcacaagagtatatactacatatatttattctttatttgttgtttctacgctgttcaacatcccaattatacaatctagcacacatgacttccattgtggtaatattttctcttaaaaattcaagatcttctttacactcttttagaccgacgtttgaatcgttcaatttattttctaacagctcaattgcttcattcaatggatactccaacatgatatctgcaccaagccatagccccacattcttcacttcacttggtttaactgtagctttagtatatagcgtatcattcaaagagtaattaaacaacatcttgtcgtcttcttcctccttctccttatctccctgttgttgctgttttataagttgacaaattttcaaagattgagaaatctcaggaattcttgtattcagttgctttaaagtgacttgttttgactcttgcataaacttgtatttttgtaacctttcctggaatctattaaagatcaattggaaatcgttgtcatttttgccagtgcccttaaataatacagaaatgtcttctacaaaaggcgcttctggaatacctcttgggttagtctttgtactattgaataacgtgtccatgctaaataattaaacagtattcgcttcaaaaaatgttatgtattatttacaaattcaatactatgtagaagttaatcttttttttcttgtcaatagacaatagacagaaatagaggaattgagattacttccaataatacacacacatgtatatacaaatatgtacatagatgcgtgtatagttcagttcagcttgttaaatttttaatctatccagttttgtttttttttcttcttcttcttcttttttttaatctctctgaaaatttccctctattctatatttcagtctataaacaaaactgagataagtggagaaagagcattatctggatatctattaattgtatttcaagataatattataccatgtatatcctagagatcagaaaagtacttatgattaaactgcatatttctacaactgtaaatctaaatattcatgtaagtaaatgcatacatatatatatatatatatttgattgcattaattgaataacatatggttataatgcaatcaccaatattggtttaattaatagttaacaactgtctgaagttaatactaatagtattagactttaatttgaactactataattgaattagacgtaaagaaagtattagcaaacatcgtggtttttgtcactctttatatcaatatcgagaagggaaattggagctcaaaacaaaaattcttttgtagttgtgctaattacgcattctatgctcgtgctatcttgctatatatatatgaaattttggaattcattatcgttattcttaacttattctagtttaatatttcctccctcctttcttcttttgtttcttttatcatttccatcatatatatacatatatgcgtatatttttatgagtattcctactttaataaatcctttaatgcttgtttcaatttattggagaaccccttttgtttattattactatcattactatgaataatgctattatctaatattggggaacttaaatattcataattgtttatagtttcaatcattgaattgtatgatttgatacaatttgaacacacacaatctttcaatctatctgctttttcataaagtattaaatcatacaaaatcctattacacatgatacatcggataataatatcactattggaatatatacttgtgttttgatttttctcctttgataatgtgtctactacgtaatctagacttgtattcatctcatcttccacaaggtatgactgtaacaatttactatccccttgcaaaggtttattatcttcttctgccctctccattctatttttacttggttcgcaataccgagacctatattgcataatctgtctctgactctttttcttatgcaactgtctcttgaaatctgtaatacttatccttgaatggaatcttcttgacttatcatcgcttaaaatataatcctccactatcataatagactgtcttttatacgaaagttcattttcgtcgatatcgtaaatcatagaattccttttggatagaggaggtttcagtggaagactctctagaccactctcctctgaattgatctctatctgcttttgatccaatttattctcatctgaccgtcctaacacacctttcattattctttcctccttacagtacctagcttgatatgcacacaaacatactcaataaacacaacctttatattgttactattggttcaaatctcttttgtatactgttcttttaaatataaatacatctcatatgcatacatctatatagagtatttatataacattgtgtataattacagttaatgaatgttttttttctcacgtttttacctttccacttatttgtctccttattaaaatatagacacatttttaacatacacatgtattattcatcgacaattctgtacaaaattacacgctactatttcacaaatttctaacaaatttttgaatagataacaaagcgtccaagaacatagactcctgtaagggttggtattctagttcagttaataaattgtccttagctatcttcgatagactatccttaatagcatcacgataattaaaaaatatctcatcacacgagttacgtaagacagttaattgtccttgaataatcggttttaataattgacatcctttcaatcctacaatactttttaatgtattcaaatgtgtcagataattatgtaggagtaaccagttttcctgtttcgagtcatgtggtctttccagtaatgttcttatacgttctgtattttctatctcatttccttcttcagagtaatatattgatgaaattactttataagaccatttctccattggagtcatacactcattctcctcaatatctccgattttatctactaatctttgaattatatctttattactatcattagaaatactttctaacataaattcctttattactttgactaataaccattccacattgatttttgaatagagattgtactgatcatgcatataggacatgtctctattatcactgaaaatttcgattgtttcatcattgccactcattttagcacagtgtaccatatcattccattcctcatggaattgaattaatagagtggtacgttttttcctatcattgtatagacgcgccatctccaattgttcacacatcaaaatccaacgagtcatagatttgactaatttattttgaagatcaatcatcccttcaatcttgctatatgactgtctctctaatgcaattctgacaaattgacttaatttcccattgatattttgatacgtcttcaaatgttcaatcaaatcattagatatcatttcatgctgcttattaggaaatatactaccaaaccttgtatacagaacatagtccatcgaatcaacttgaacattttttatttttaaccctttaaatactaaatgtgctaatgttggtaaccctatatccatatataattgtatcagtaaaagtgcagtctgaaaattatgtatatctctttgttgataattctcaagtatggtaatagccaataatttatctttcaatgttttatttggtaaaattttcctattaattatatccatgataaaaacagagttgcttgaataatcagtctttaattttttatctaatgatttcttgtgacgttgatataaaattacactatcttctttgggtactaagtttaacttaaaaatattggaatcatgaattggagaatcattgggtaagttatgcataattatctccaatgttttttcattgatattttctctatatttttgaatgtctgtttcacaacatgacttatcatggaatttttttagataataagataacgattcttgagatactgccttattgtatgtaagatcaacttcaaatctggatagtctactatttcttgaatcgccaacagtttggtcaatcaaatttaaaatttcttgctcagtttttcccaactgaaatccagaatcaatcaatttttgtattaattgaaaatcatcgattttagtaagtaaagataaacatgcatcaaataacaattgttgatcttttacatgtttaatcaaaaattgtttcatatataaatttaaagaatctttcaatccacctaaaatcatatttgaatcaattccattatcagaatataattcctcacataccatgcaataaattatagtttcttgttcagattttaatggtttcaacttctccaacctctcaaatgcaagccttggtaaaattttagattcttgaactgtaactctattcttctgatatctaaagtatgcaatagtagcaattgcattccaaaaattaaacattctaccatagtttttactggtaccagtggtagtaacagtgttgccactattgttatatgggaaaagattagaatatgaacataaagcagcactagcctcaattaaacgacgatagtcaaaacattgtagagctctatcaaaatattcatacgccaattctaatccaccaaattttgaatgtgctaaatcaaaagcattcaacgcataatcatgataattcatctctatcaacattctatacaaaagatctaaagctcttaaatcattagtaattttgttgcttactgttttatttattgcatatggtttgattagtattttgtcaatatcgaattgttgaggtaaatgtttatatttcacatacaattccagtatttcatagtaggcagatttgggatatcttgatcttaattcgtttattcttttataacattgtttaaatgcagattgtttgataagagctctaatttctgtttcaatggattgagtaccattcattatcaaaatccagtttcttcttctagatataataatagaaaagaagagggggggatgaaactcttactatgagtatatagtaatctttattagttaattgatcgagccaagcgaccacttctgggtatgtagagcaaagtttaagtagataatgaattttaatggtctatctaaataaaatgataatacataaccttgaacatcttagaaatttataaattataaatatttcttttttgtttctattttttcaaaatgagatttttcacatatgaaagtagcccaaacacaaaccctattacacgcaggtaaaccaccagagaaaaataacaaaaattctacagaaatattaggttatgaaaatgaaaatttatcttttctaaaattttattacggagaactaagagctttgtaaataattcgtaacaactatttcatcgttgactctttcatctctttctgtagaaattatacacaataatatacaggatgtaatcacatagctacaaagattaacacatgaatatatatatatatctacacaactgcaacaagctgttgtagatgaagcgtcctataaagatacagttcatagaccttgctcctattctcatcccatcttttttgttttcataaaatgcttatattcgccaacattaaaagaaaaaaaattctccttatatcatcattatgatgaagaagaacaaacatacttattgtaacctatctaaaatctgtaatctctcatttaatacatctttagaaacttcttggatttcaccagcaaggaacatctcatctaaaaccatataaactttgtaaaaattaaatacaatatccaactcacagacatttccaaagaaactatccaacacctcgataaaaagatgaatatgtgataaatatattggttcttcatcatctatgtcgacacccataacaaaataaagccctgcatatcttttgtataccaacttagtagtatctgaaaattcaacaaagttactttgatgtttatggtctctgctactaattagtctatatatttgagcaataaaatcttgtgttacatacccagaatctattactgtgtaccaccgtaccaaccttacaacaccttgcttattaaaacatagaataaatcgtatacccatcacaactatccaaaaaaataaaagaaaaaaaagaaaaaggaaaagaaaatattaatctatttggtatctatctctctatatctttatatgtattttgtttgttatgatctgattaatactttattatgtaatatgtatatccttatatagtgacacaaaccaaactgtgcaatcgttctgtgtacctaaagatatgttcgaagatactcgtttgttttattgtagttgaatcaactccacaaacattggtgattctttcatggataatattgaacgtgacactgtttttagaatcattgtcctcttttagatcaaatgctgtgaagccttttttttttcttccctttcatatctttttctgttttttacaattagtttttcttttcttgcccccccataattatttatctttggaataataaaggatcctttagactatatgatgaggcaaaaaaaaaaaaagacagggtcgacaaaaaaagtcatgaagtggatgtataatgtgttgtgaatacatgattaaagtgcaatagtgaaagtgtctgctccattttttgtcgaagaaatagaatcttgttatcgacctattcatagtattacaagaccagctagttgtatttattaacagatgaatggaaatcccattaagttgaatattaaatttgataatgctatcaagggaaattttataaggttacctccagaattggctactgagatttattccagtgatatacctatccaagaattttatttcaaaataaatgatcgttggtttgtgtcatgggatggattttactcatcgtcttcaaattgtgttgagattaatcctgttttagccaatatgctaggctctttaagacataatgatattataaaattttctgtatgtcgattaccggtcgaaaacatacgagtagcattatccgaggtgtatgtcaaaccgtaccatagtgatgattgggagatattagaaaataatgcagaattcttacaatctgaattattgaatcaagttaaaattgtggcattaaataatccaataatttgttccataaataatattatatccagagttatagtggataaaataattcctgctaatagtgggtttgggagacttgataatgggactttgattgttgtagagccaaaagtgaacaaaaacaggaataatagatataagaatggtaacaaacaaaaaaaatcatttaactcagatacatcaatcacaatagaaagaagtttggcatggaatattgagcatgacaatccaaatagtttaaaagtatttgttaatagggaaaactttgaaagtaagtttggttttattaaaataataagttgtgatcccataagcatacaggatgtcacaaaaaatgcaaactcttctaacttacaactaaaattgaataagatctttattgagattgagaacaaaactgatttacatttaccgaaaaatcatatttgtttttctaaaaggttatgggatgttcttggtttcaaacacaaaaataatggttatattctccagttagaattgtttaaagataattcatgggtagatatattcacagatattgaacatttagatataacaattactcattatatagaacaagatgaaagacaattagaaaatttagtcaaaaagatgcaatatttaacaaataatatgtctattaatgatgaaaaatttcaattcaatatatccttatcagcggaaattagttttataaaaaaagaaattccatatgttgacatcaagaatatcaaaagttatcattttatacataaattagtcaagaaaactagaaatgttgccaacttggaatcaatttctgatccctcatattgttataccaatagtataatatcagatatgataaaccatttatcttgcccatttagtacatctagtggatcacttctatgtggtaaatccggtatgggcaagactgtaacagcattaaaattgtattacaatctcctttatcaaactaaatatcgagtagattatttaaactgtgaaacacttataaacagcttttcgctggagaagttaaaaactattatcgaacaacaggtataccagggatatatatataaaccctcaatttggattctagataaagccgatttcatatttaatcaaatcaagtcaaatgaaaattctagttcaacccaaaataaatccaatttatctgataaaattacacattatttaatcaatactgtggaagcagttaatcaaaaatttaataattgtattcacataatatttgtagcagatagcagagatagtctgaataacatattatttgataagcatttcattaataaaatatggacgttaaaacctccaaacaaagaagaaagattaaaattttttgaatatttcagtgcaaatagtgtattgtttacagatattctttcatgcgatgagacaaatataactttctccgatatagctttggaaacagaaggctattcaccattagatatatctaattttgtaataaaattatattatgaatgtaaattaaacggcagtaccacaatatctgatctagatttccaaagggttttaaaggattttgtaccgtcggctctacaaaacgtgaaattacagaataaaaataatggtatgaaatgggatcaaattggaggattaagcgaagctaaaaaaattttattagagactctagaatggcctacaagatattcaccaatttttcaaaattgcccactgagattaagatcaggtatcttactatacggttatccaggttgtggaaagacgctgctcgctagtgcagtggcttcacaatgtggattaaatttcatatctgtgaagggtccagaagtattgaacaaatatattggtgccagtgaacaaaatataagagaattatttgaaagagcagaatctgtgaaaccatgtattttattctttgacgaatttgattctattgcaccgaagagaggacatgattccacgggtgttaccgatcgagttgtcaatcaactgcttacacaaatggatggtgcagagggattggaaggtgtttatgttcttgctgcaactagcagacctgatttgattgatccagcattattaaggccaggaagattggataagagtgttatatgcgatattccaaatgaaatagaaaggttagatatcttaactaagattgtaaagaaacataatatacatttagagaatgaacatgatttaaaagagatagcttcattgactgaaaattattcaggagctgatttgcaagcattgtgttataatgcaaacttaaagggtatccataggaaattggacaaacaaaaggataatcaattggaatcaaacacttctagtactactaataatgatgattctacaaagctccataagtttctgcttgttaatgaaacagaaagtaaagaaaatagagaaagggtcaataaatatcttaacaaattttgtagttcaaagaggaatgatttagaccctgagagactagaggataacagaattctaaaacaagagaatagtgtaaatgacagtcaagaggaagtgataactcgagaggatttgttggcggtgttacaaacaacaaaagcaagtatttcaccaagtgaactcaataagttaggttatatttataacatgtttcaaggtaaaaataaacgtgaagataataacattatgataaatgagaatcctgataaaatagtatctgatgtgggtacccgtttatcactgatgtaaaggacgaaatctatatttaacactgccaacagtcatttaaaactctcacacacataacatacaaatatgtgcagaagttccgccttcaaaaacctacaattcctgtattttcaaagacatagcgtaaattagatcttggcaaatctgattagtttagtttgtcctttattaaattactcaatagggaaatgcaatgtaattgttactttttttttctttttttttttttcttatttttatttacacgttaaaagcggcaatgtctgggtggacgcttaattccccgcatatccccatcttccaccccacgttgtacttttttttttctatttgcgtttcaggtgtatcttttctccgattttatctccttttaattcccagttctcgcaatgaaacattttcatgggaaagcagaaacaggaacaacataactctcattcaaattaaatttaatatcccatgtcactttttccttcttcttatcagttatccaattgcaagggaggtaatctataaattagatcttgaactctaatttttcttttttttattcttatgtatattccttttgtttaatagtgattcacaaagattcataaataaaatatctttacaatctcccatcttcagaaggaaatatttctgccacgaaaaacctaataccggtacaagagaataagtctttatctcacaatcagtttaaacatatataactcatgaatctcatatttttatactacctcattatttttctttaattaaaggaaactgaaaaaaagcaagcaagcgaacatcgtcattactagtgataatatataatcaagagttcttagtcaaaattattcaattaacctacttgaaaatattttattttataataatatcatttatccaattttaatacacatatatataagttttttttcctgtgtgtttatagagttttaaggagaaagaaataacaacttagaaattccaaatattggtctgtgtacaggatatatatgttgattacttggggacatatagaagcaaaaaaatgttgaagaagaataagagcaattcaaatttaaaggcatctacgttttcttctgtatctactattaagtcattaggtaagaaactattaacttcaaaatctttcgaccataatgatgttaataaaaatgttaaaccaatcaagacgttgaaaaagagaagtacagttccagctgtgtccaatactgaatcaaaaactcaaaatataccgactaacactccaaaacctataagttcttctgttacttcagcaagaaggtctaagatgaatgaatctagaaataattctgttagtgaaaggaaaatggtctacaatccatatggtgttatgtcatccagtattaatagtagcagtggtgctagttatagttatatgagtaagaatttgagttcacatttcagtatggggtataacagtcttggttcgattaattcttcatccttgagtagaagagatccaagtttatacctgcacgagggctcccaatctattagaatcttgcaattgccaattgcaagtccgaacgattatttgccagaagaatttcaacagaaatctattcaattatatgataattttaaatttgagaacgataataaaagtattggtagtggtgggtctgcagatgttacgaaagtggtcacgaaaggagttaaggccaagcactatgcattcaaaagattaaatttgatttaccaggagactgatgaacaatattataaaagatgttccaaggaatatattattggaagacatctgaattccataaaaggatatggtagtatgaacattattgggatttaccagttatgtaaaataccaactactacgaaatctgtacgaggatggggctatatcatggaattagctaaatatgatttgtttcatttgatgacccgtacaggctggaaaagtgttgatgtttctgaaaaatactgtatatttaaacaaattgcaaatggtgttaaattcatgcatgataatgggatttcacacagagatttaaaacctgagaatgttttgttatgtgaaaatggtatatgtaaaattacagattttggtatatcttcgtgggtatataacgatccgaaggatcctgagagtggaatcaaaatgtgctgtggtatgattggatcaccaccgtatgcgcctccagaagtgatgatgtgggattcaaagaaaagttattcgaaagagttacagaattcatacaatccatttttaatcgacacttattcgttaggtataatattaatgaccttacttaataatgttataccttttattgaatcatgcgataaagattcgaagtttagagactatgaattggcgtatgaaagttactttaaatatgaaaatagattgtttcgtaagaagggcatttacaagcctggaccgggcccagaatatatgtttgctagaatgttcaacgatagggagatgtctcgtatagcatggagattagcagatccttgtgctgctacaagatataatatggatgatttatttaatgatccacgatttcaaaagattgaaatgtgcatggatccatttgatgagattacatataaatattcagaacctgaattgttgtatagttcattagaagagagtggaatatcaaatataggttcaaagacaaatacagttgtggcgtctacagagaaccatatatcaaggtcgatgataagtattgctgaatcaccaaaggagatggaaaagaaacctgtatgttcgttattaacaaaaatgctatcggactctaacagtagcgtatcttcaacaacttcctcgaccatgaattatgatgaaatgaacgtatcaacctccttctcttcttcttcctcatcctcttcttctccctctcctgcattacctacaatatctttaggtaaggatacagatttattcacattggaggaagaagaaactgaggagacgaataataaggatgtatcagacagagatattaagtctatagtatcaaatgagacaataacaaggaaaacggtagataaatcatctgaccgaatgaaagttagtgaattttcaagacaaaggagacgcagaatggttgttcatcatcatctacaagtcgttaatagtgtgtcttctatgaattcacctatattttcaaactcaatgccatcgtcaattatgtcatctgttggttcttcatcgtttagaaaatggtaaatatatagtgtataagtaatagaaaggtatacatattatcattattattgtgttttttccaccactttgttgatgcacaaatgctattcattcataaacatctagatcagttagaattttagtggaggtggagaaagtcaatccagtaaatcaattaatacaataaggttaactaagcaagaattattgttaaacaaaaaatctttaatttattgaaatatgaatatttttaatcaagaaataagcaataaacagagataatacaatagcaacaacaagattacattaaatgaatctaagccatgtagggtggagatgacttgacaatacgaaagattaagaaagtttatcatcttcaacgacagctgtatcaagtttttcataattttgaaaaattgtcttcccttcagtacatttgtgtgtggatcaaataaaaccccgcggagttaaacatgtgataaagcatatattcttttctcttctaagtcatttttttttcttccttttttctttttttgcttgtttgcttgctttttttcttcttattttcttttttcagatgagcgaatgttggaaacacaataattcaattagagtgtttttttttgttttcctttgttttttcacagttaattcttcactcggtcccgttattgttcctctcctctccgcaaaaataacaaaagaaaaaaaacgaaaaacattacaaataagaaacaaaggtatacataaaaaaaatgatggctaactattgtgctgcttataatataaaaaacatttctgacctctattgtccatttgccttcttttctcctttgtttttttgttcttttttgatttcccgattgttccagcacctgtcaaagggaaaaaaacaataaaataaaacaaatattcagatagacttgcacccaaaaacgtttgttttgttttgtcttgttttgtatttttcctattaaagttttaattttgagtcatggaatcaatatctttcttttctttctttttctttctttattctctccaatttctctccctgtgtatttgccgcttgttgtattttggagtttgcaaatctgtcgatatctcaattcctcgagctgttgttcatcttatgaaaaagataagttctgaaaaggctattatacttcaagtgttgcaagaaactataatatttaaaaatacgtacaagctgtagaaggaagttatttgctacaatgtatttccatatacacacacaaatacatgttgttcaagaatattttataaaactggtatcatcatttgtacattagattcttttttttttctttcctttttttttggattggtttctgtattcattctttcattttataaataataagaataagaataagaataataaaaagtagtcgttaaaagaacatatatacctatatctattatatccatccacatgtccaaaatgcataagggtaaaattcatataggtaacacagctttaaatgaaatttctcgaatgtttttctttctcttccgtagattatcaaggtatcatctaaaaagatttttatttggtataatatttattcaatttattttattcattatcatatggtcctcgagttataaaagaaccactgaaaaagctttaactcaacaacaaatactagatttggagcatcagactaggattaatccccacttggttgatccagattatgagtattttagaaattctaataataataacggtaatgatgtctcagatgattatataagttttctatccgactatttctctagttggtattcatcagatggctcagacatggatcaatctgttgcagatgtagacactgtatctagattatatgaaaaattcagatacaatacaaaacctttctggtttgatgactatactttacaaaaaaacctattgactatcccatatggtccaaacagaggtcaaaaatggacttgtatcgatgatattcaatactataacagtgacccaagattgatttggtctgtttatatggactatatcataaataattatccacaacataaccaaaaaaatattgcctacaattggaagtttcctttctcttggtatgattggattgatatgcatgatttaaataaattgatctctttgaacgaaacaagacccacatgtgagttcttatttgagggctctttttataaagacactttgttgaagatcgagaatgaagtaggagaaactttatttgataatggtcgttccaaatatgatcaggatggatggtacgtttatgcaaaacagtatggtgataatgatatccttggaaaattgaaggattattgtacctatttggtggataaaccaaagttttcaactggcctaaatattactaagcaagatccaaaatgtagacctgaagtgtttcaactacaaaatagaaattatgtttattcttcactgaaacctcctttatctctctcggtcactgcattgaatgggaaaacttatcaattttattttgatcaaaatggtccacgacaaaatatgatagaatctaatcttctacaagattttattaagaataacttggatttgccttctctaaataacacacagaaccttttagattataatgatctggtatttaaccatttcgagaaatttaataatttcttggagaattataatatatccaaaaattttgttgttaatgttaaagaaacagatagcaatctaataaacttagaagaattgatcctagatgaagctgattttgaattcgatccaattgctaaaatcaaagaactggaagctatccctgaagaagaaatgactccacattttaagaattatttggacagtctacgtacctcaatcacttatgcacctgaatttagtcccaaatattttcaagagagtggtgatattcaagattattacgggattgggtatcatcgtgatagtaggtttttcaacgtggacagtttcctttttgacaaacaagaatatgcaaatagattgaattcaatgattagaacttttcaaaaatttactctatctaatggtatcatatcttggttgtcacatggtacactctatgggtatatgttcaacggtgaaacttttccatgggatgaagatttcgacttgcaattacctatcaagcatttaaattatttagcacaatattttaatcaaagtattattctgcaggatccaagagaaggtaatgggaggtatcttatcgatgtatcaagttctatcacagtacgtactaaaggcaatggtaataacaatatcgatgcaaggtttattgatttggattctgggttatatattgatttgactggacttagtgtttcttccattttcgctaatgttaaagttagggggtatatgcaagaacaattaaaagaactgcatttacatacaaataattccgtgttacaagtcccagaggattcaaacgcaaagaattcagattatctagggttaatggatatatatcaattacatgattatgttcataaaaataacaaggagtttagtgaatcagacaggtcctccgttgataaatttttgagagaggaacaaacaacgcaaaggaacatcaattctatggagaaattattgaaacctgcacaaagatattatttacataaaataatgaaactgtacaattgtagaaataatcatatcagtcctctatcatatctgtcccctatgtataatagaatgttccatggcgttcctgcttttgtgcctaaaaaatatttacattttttgaaaaatgaatactatgtatcagaggattatgcttacattacttacaaatctcatgttttctttccaggtgtaatgcattgggttaatgaacattttgttaagaaatgttcaaatattaataattggtatagagacacaaagaaactatcaaatatcacaagcattgaacaaatggagtttaaagatatgaaaaccttcgttgctaatatgaagttttatgggaccgataatatgactacgtttgccaatctctataatgcatttgaccagtttgcctacagaatgaaggaattggcgattgaattcgatcctacgttgaagcaaaaagagaaaaaagagttattgaatattttaaagaaccaatgtagtgaaaagattaaatcgcccggaaaagatgcacttttatatgtatatgaaaagagactttttaagaaattagctagaaattttgatcctgctttaatcgaagatgtgaaagataacatcgataaaatgtacttgaataaatactggaagcaattgttaggattgaagaaccgtgaattgtctctattccatacaaactttgaaagttcatctgaatatattgtgagaccatccaattctacatctaaattggttgatatgaattatcaagggagaaaggatatgtatcctgataagtttagtaattgtccaaagttatttagtaaagatccaaattgatttgagttttattggcattcaattattattaactaaaaaataaaaaaaaaaactgcatacttgatatcctaataaaggattatcttttttatttctagcattaagttatatttgaatattgcattaattttcctctaaatactttttgtgcccgcgcgcccctctcatttatataatatagggatataatcatatacaattataaaataagaaagtaataaaagttataacgttccgtattgaataaaataataattattttctattagattaattcatataaaaatataaagatttatttttcaataatagatactaatattgattacattgcaacaattaacacattatatacaacatttgtatcatatatcttaggataaaataatttccaaaattattaagccaaagtcttttcaaatccttgcttcaagtcttcaattaaatcatctgcattttcacaaccaatggaaaatcttaataaagtttgatcgatttcagggtcacttaaagccctccattcgaccaatgattcaacaccacctaatgaagtagcgtgttggaaaagtttcaatttacttggaaaatgtttggcttgttccacattttgtagtgtgatagaaaatacaggtgtatgaccaccagtagcttgttctttaacaaaattttccttttgtaaagatgaatgatagacatgtttcaaaacgttcttgtatttttccatattatcctttaagaaattaacaatcttagttgcattttcagattgcttcgaaattctcatctcgtaagttcttaaagatcttaataataggaaagattccaaattaccaatgattgtaccaaggtacattctatcaactttcaatttgttgtaaacagtgtgatctttagtaacaagaacaccagctagcaaatcagaatggccaccgaaatatttagtagcagaatacataataatatcagcaccaaatttccatgtatcttgtaaaggtggtggtgcaaaagtagcatctacaatcaatgtagcacctttagcatgtgctttatcagcatattcttgaatgtttaccgaaacaccatatgggttaactggtgattcaatatggattaaatcacctggttgagcaaacttttcaatgtcttccaatttgtgctgttcaagaccatagtttctagtcatgatatcagcaattgcacgaacaccgtgataactttcaccaataaataatctctttggattgaagtgaaccatagcagcatagaaggaagaaacaccggtgctataaaccacggcataaccatctaaaactttagataatacgctttcaactcttgttgcatttggatgaccacaacgagaatagacaggatttctatccatttcttcgatgcattcactttcgtcacagatttctaaattagaattatcgtaacggaaagtagttgccacattaatgggaggggccacatcactaacacgattgtccttatcatctgcatgaatcaaagaagtagctaaataagtcatggtatgttttgtttttttattatattatttttttctttctttaaaatttggtttgtgtaattaagataagtataatacaagactgttattctataagaattaaaaaagagataatgaaaggattaaaaaaaagatgaaaaaaaggattaaataaaagaaaagatagatttaataatacatctagtaacatcaaagtaccttttttcaaaaaatatgatcgggaatgatgaggaataataagaaaaaaaagatgagaatactcttaggaaaatttactccccctagatatactttcaaaatttgcttgtatgcactttcttgtcaattttatttacagtgagtcatgtaggggaaacaaattagagatttcactcttccatcttgatttaaaaagttgacttatcacgcctttatcgacatatttgtcgcagaaaaatgccaaaaaaaaaaaaaaaaaaaaaaaataaaaataagcgccaaaattaaagatagagttattaaaaccaaaaaagcgtgggtgaactgatgttaaaactattggtctgtagagaaaaacagtcctaattcctcagaacaaccacaaggacttatgaagatgattgcaaatgataccaatttgaattgggatagtttagcaatcaattttgaaccaattgaattgcatttcgcctcgttaagttgtaatttactcaattttaagagttttagtaatcatggccaggctttaaaataagctacattgtaaaatccaaaagaaatgatatgagatttagtaattatagagccagaaacgaataaaagatgaagagaagaattaatatcactataaatacgtatgtagattagtattttattacatcggttcgtttatttggccattataacttattaatgtgaataccagagaagacagataactgttattataatatatatgtagcaactttgtagaagaagaatactgataagacatcaagaatgaaattgacaatgtcaagttctttaaacttgccggaattactatatttgtcctaatttcatgaaggtaatcatagttatgctcttgatattactaatttcaaccgtattacaccgaagacatattattatatctttatccaagcggtttttacacatttctaaaaatatttttcttattaaataacgttacgtagaagatcttaatgatctagtttacaatatcagagatactcttttatttttaaatcaggacaaagatttgtgtcgatgtaatataagtaagatatcatactaattcctagcaaagatctattgaatttttgggcatgtgagaaaacacctagtaaaaaaataataagaatgacaggaatgataaatctacacaattgcaaagagtatacacaagaagatgttatataatttatctttgtattaacaattacatatttaataccttcttcaaaattttaacacaacaaacctatttatcgttaaaaacattttggtttgctttgtttagtttgtattatgttatcgcattatttgaaacaaagataatagattctacagttaaggttattcagaaaagctaatacaaattgagtctgaagagcaaaaaaatattaagtgctaaccatgtgtctcatacatggttatatatatgatattcttctatattttataaaattatggagatgagaatgatatatattaatcttcaggctcctctaatatatatttagtttatcattctctatatctttcttatttattgcagtcagataacattttatataatgtgttaatggcaagtattatagcttgcttatgtttcttccgattccttttattccgattccttttattgtgtcgtgggcatctgttatttaaccttgttataaatttgggattaataacatattaggaaaattatttagcggttaaaagaaatggtaaaagaaaaaagaagaatatagaatgttgttcaaaagcgggatcttgtcaaacttcatacgaaaaacatatgaatataagaatataattgccagatacacagccagcatagaatattaaaacaatagtaattatttcaaattctctactatctgtctcacttcaaaaatgattctttccttaaaaaaaaaggtagatccaatccatcctcactcacgaaagcaacgactggtatctaagaatcatttacaagacgacatatcaccaacctcactaaatttaagtactacaccatccataaatgaaaatacattaattaacggatctattggtccagatataaacgctttgatggatattagtaaacataaatatattgatggatttccggattgtaataatattatctttgatcaattaaagagttcaaatttgcaagaaagagaacatgcagcacaacaactatctaaaaatttattatctattgaaagagaattatcagtagaacaattccaaagattcatcactaccttacataataaaatatttgaattaattcatgggtctacgtcaaacgaaaagattgcaggaatcaaagctgtagatgtcttgatatccttttatagttctcatgacgaacttcccaaccaaacatcacgtttagcaaattatttgagaactttactaccttcaaatgattcagaagttatgaaacaagctgcgatggccctgggtagattagccgtcccaggtaacacaataacaacagatttcgttgatgtacaagttaatacgtgtattgaatggttgactgtattaccagaaaataattatagtggtaaggtagaatatcaaaaacacgccgccctattaatattaatttcatttaccaaaaattcaccatatttgttgtatccatatgttaatccaattcttgaaaatatttggagaccgcttagggaaactaaggttgcaattcgtctagatgcagctgaattattaggaaattgtctttgtgtacttcaagaaagaaatgatgataactgtaaacaaaaatgggtcaaatctctatatagtactgtcacagatagttcattgccaatcacaccggagttaatacatggatccttgttagtgtatcgagaattacttaaagttggttctggtaagtttttaaagagtaagataactgaaattttttataagattatgacttttaaaaattataaattagatataatacggcatgagatttatacaatattaccactggttgcaacatttgatcaaaaaaaatttatcaaaaagtatttggatattatcatggtgcattatttgactgtactgaagaatatgagtattaattcaacaatgagctgtgatagaccatatatatatgtgtcaataggtgatatttctagtcaagtaaggtctcatatcaatccttacgtgaaacaaatagtagaaaatttacaagatgctttgaaaagtaaattgaaggttcgaaaactctatgagaaggaattattttattgtctaaataaattagttattgcaatgggacctgctctagcgaaatacttgcataatgatttattgcgacttatctttgcatgtactctaactggctatatggaagagacattattaatactagtagacaatattccttctctggaaaagattatcaaaaaaagagtacttactattatcagttactatttatcaggtgaaagttttgaccactttgaaaaacagaagatacctaatgaatctgtcttagaaaatggacaacgatggagaaataagtatatttttaataaaaatgacgaacccaaggataaaacaaaagatgcacaattgatttcacaggctttaaaaacgctacgtaatataaagcttgaacaatccctaacatcttttgccagaactgtattaattacttattgtgaacatgacgatcccattgttagaaaatttgcaactttgacaacctgtgaaatttattctaagaaccataaagttatgtcttcaaatgacaaatatacattaatagctgttaatgaggttgtttcaagagtcataattacagctcttgcagatccggtttcagaaattcgcttggagactttgaaaaaactaaacaatgtatttgatgcccagcttgcacaaccagataatgctagacttttaatcacgagtttgaaagatgaagtattcaacattcagaaagagggtatgaatctactgggtagattaagtcttgttaatcctgcatatattgtaccacttttaagaaaaacgctactggagttattaactgaattaaaatatacaaattggcgcagaaaaaaagaagagtgtttgatcttgcttaagattttatgcagttctaataaaactattgtagagccatatactgacatattaatggatcttttgctgaacaatgctaaagatacttcctctattgtaacttgtggtgctttggaagcgatatcaaaattatcagtaactattgaacaggacatgatgctatatatggatagaataataaaattgataattgatatactgaaggataaatccaatatctataaaaaacaagttgctgtgaaaactttaattaaattagtgtcatctactggttatgtgatctcaccactattagattatagtgaattgttagggatactactgggtattcttcagagtgatgccttaaaggatattagtctagatacattacaattaattggtactttaggagcattagatccatacaaacacagagagatttccactactaatatctcttctaaagattcatctatgattaacgcacatacagatatcaatctactaataagtggaatgtcaccaggtgatgaaaattattatccccttgtggtgattgatgtgttaactgggataatggcagacactagttattcacctcatcatacagtaattgtacagtcaattgtacatatatttcaagatatgggaaagaggtgttctgttctcctagacaaggtgctcccaaccttattatcggtaatgcgaacatgtcctccttctatgttagagttttatttccaacaattaggtctgataaccaaaatagttggagattatatgagtccatttgtagatgatatcttgcagctaataaatgactttttaacaatcaaaactttacaaccaaccatggtgatgctgatagagtcactggcgaaaggcttactgacaaaattcaaagtatttgtacctgcgactttatctatctatgtaaatattttagatacagataagtcaagtggtaagaaaacttcaattattttgcttaagtcattaatatcctttggttctagtttggaaaattattcatatttaatactacctacagtaattcggatttcagaatatggcataaaatctttgagaaaagtagctattgttactattggtaagttggcaaaaattattgacctatcagaaatgacatctcggataatccaaagtcttttgagaacactaaacagtaatgatgatgaattgaataaagcagtgatgaatactttttgtcttttgttacttcagactaatttagattttttgatttacgctcctataataaataaaattttattacaaaaaaatattcaacattcagtttatgatcaacttataactaaattaatgaataatgaaagaattcctaacaactttttctttgagagggaacaagaaaatttgaatagaatccaaaaaggaagttttaaggagcctgaaaaattgccaataaatcagaatgtgttgaagtcaagttggaattgcagcaacgtaaaaactactgaggcatggagagaatggtttagaagattttccattcaacttcttaaagaatctccttcttcgacattaagagcatgctcttctttagtagatatcccatatccactaactaaggaactttttaatatatcttttgcaagttgttggaaagagctttttagtgaaaatcgtgatgacttcataacttcattatcaatggcattgacttcgaacgaatgtcctttagacattcatcaaaatctacttgcattgattgaatatatggatcataataatacaccactaccattatcattagagaagttgagtagcttttctcaaaaatgtaatttttatactaaaacactttattataaggaattggaatataaggaagatcaagattctaagattattgaaactttacttaatttaaataatcaattacatcaaactgattcagtgatcggaattttaaaatatgcacaaaaggttcaaaaatcacaatcaagagaggtatggtatgagaaactacaacgttgggaggatgccttggattcatataaagaacgagagtcagcaggtgaaaattctttcgaaataacattaggtaaaatgcgttcgttatatgccttaggtaattggtctgagttgtatagtcttactaaagagtattgggatgttttagatttaactactaaaaagaaaattgctccattagctgctactgcaacttggatgactgggaaatggaatttcataagagaatatgttaacaatatgtctcataatacccaagagtatgaatttattaatgtaatttgcaatattcatagtaataattttaaagctgcagaatatcatctcaaaaaaacaagagaattgattatgaaagatattattaatctgggaaacgaaagctactctaggttgtataatctatttactagagcacaggtggttacagaattagaagaagttattgaatacaaacagtcacccctagactcgaataaaagaagcaggataaaagaaatatgggataaaagattaaagggtgtccagaagaatgttgatatttggcgtaattttttgcaggttcgttcattggtacttacacccaaagaacaattagatatatctattaaatttgccaatttatgtagaaagtctggtagattggcgttatgtaattcaatattaaaccagttaatggatccagttgaatcacctgatcaaataccaaaagttaaggcaccaccgacagtaatatatgcaaagataaagtatttatgggcatgtgattcctataatgaagcgttggataacttgattatcttaacttcaaagatgatgacagatttgggatttgaaacaagtgatgttatgacgggaacaagctgtgtcaggtgtagtgtaccttcatataaattagatatgtacaaagagttattggctaggtgctttgttaaacaagggaaatggatggtacatttagaaccaacgtggagaaaaactaaccctgacaaaattctaagctcatatcttttagcaacgcattttgatccactatcatacaaggcatggcacagttgggcattagccaattatgaagtaatatctgcgaaactatcagatatggaaggtgaagatggaaatcaaaaagacagtcatgcaactttggatgtgcatgaattagacatccagcattatcaagatgatccacatttgatttataagcatgttgtcccagctattcaaggattttttcaatctattgcgttgtctgaatcaagttctatgcaagatgcgttaagaatattgagtctttggttttcatttggtggtatccctgaagtatcacaggctatgcaacaagggtttgcatccaccaaaattggaacatggttagaagttctaccacagctaatctctcggatccatcagcctaattatattgtgagtagatcattactggctttgttatctgatttaagtaaggtccatcctcaggctttaatatatcctttgactgttgctattaaatctgagtctgtttcgagaagaaatgccgcacagtcaattatagataaaatgttatcgcacagtccaatattagttcaacaaggtgaattggtaagtgatgaactaattagggtagccgtattgtggcatgaacagtggtatgaaggtctagaggaagctagtagacaatatttcagtgagcatgatgttgataagatgcttgctgtcttggaaccactttataaaactttggatgatggtcctgagacattgcgtgaaatatccttttacaatgcatatgggcatgacttagtcatagcgaaacatctaattgagaaatatcaaaacaaaaacgagaagaagtatattaaggaagcatgggatacatattacttagtttttaagaaaataacagagacattaccactgttacaaaatttggaactacaacatatatcccctaaattgttggctcttgaaaatttagaattggctattccgggtacctattttattgataaacctataatcaaaattgctaaattccataaaactatttctgttatctcttcgaaacaaagaccacgaaagatcacaattaaaggtgatgatggaaaagactatcattatgctttgaaaggtcatgaagatattagacaagatagtttagtaatgcaattatttggtttggtcaataccttattgcaaaaggatacagaatcttttaagaggcatttggatattcaacagttcccagccatcccactttcacctaagacaggtttgttaggatgggtttctaatagtgatactttccatgctttagttaaatcacagagagaagctaataagattcctttgaacattgaacactggataatgttacaaatggcgcctgattatgataatctggaactcttacaaaagattgaggtgttccaatattctatggataacacaaaaggtgatgacatggcgagggccttttggttaaagagtaagtcatcagaagtgtggttagaaagaagaactacgtacactcgttctttggctgtgatgtctatggttggttacattttgggacttggtgatcgtcatcctagtaactttttaatagatagaagcacaggtaaagtcgttcatattgattttggtgactgttttgagtcaactattttaagaactaaattcccagagaaagttccatttcgtttaactaggatgttagtaaatgcaatggaaattggtggtattgaaggtagtttcaggattgcatctgagcatgtaatgagagttttacgtaacaatcaagactcattgattgccttacttgaagcatttgccttagatccgttgatatattgggggtctgatttgccaaagacaaaaattgaagaacaaacggggatcaatttgtcaatgcctaacccaaatgaattatatagaagaggtttaatatcacaagatgatgtgcattctatggaagtggagcaagaacgaaaattgaaaaatgccagagcaactttggtgctgaatcgtattaacgacaagttagtgggaaacgatatcccacatctatcaaatttagatgtgccagagcaagtagataaattgatacagcaagctacttctattgagaatctttgtcagcattatattggttggtgcccattctggtaaatgttgttaataagcactatgatcttattccctctgtttaaaaatgtttagactatttttgatttcttcttaatctggacatatataagtgtgcagatgttttttgtaatgtatagggttgtttacaatgtgtacgttgtagtatagataattatctacttttgtattttttgtttgttagcaaaaaatttttttttttgaaaatttgatgcttagatagctagtacattattgaaaggaagaagagttgataggaaaagattgatctagtagagtgatagcaagcaggttactcatataataccatcgtttagtaaagtgaatttaatagtagcaatacagtggctactatttgcgtgacttaaaaaagctcataaggatataaaaatataagaaatatggaccattttactagtaataaaagacggagagttattagtaatgtagataaagaacaatcaataccatgggttgaaaaatatagacctaaaactttggatgaagttacagcccaggatcatgcagttactgtcttgaaaaaaaccttagaatctgctaatttatcccatatgttattttatggtccgcctggtacaggtaagacttcgacaattttagctttaacaaaagaattgttcggtccagaattgatgaagactagagtattggaattgaatgcttctgatgaacgtggtatatcaattgttagggagaaaatcaaaaattttgcacgtttaactgtatctaaaccatctaggaaaaatttagaggattatccatgtccaccatacaagattatcattttagatgaagctgattcaatgacagcagatgctcaaagtgctctacgtaggactatggaaacttattctaatgtgaccagattttgtttgatctgtaactatgtcacaagaataatagatccattagcatctaggtgtgcaaaatttaggtttaaatcattggagacttcaaatgcattagaaagattacagtatatagctacacaagaatgtgtcaaatatgaggacggtgttctagaaaaaattttaaccatatcagctggtgatttaagaaaggctataactttattacagtcaggatttaagttagtagattatatggggaataatcaaattaccattaaacaaattgaggaactagctggagtggttccttcaacagtagtggaagaaatagttaaacaaattaatagcaaagatttaaatcaactgatttcctttaccaacgatttcataaaaagtggatggtctggtgtctctattgttgatcaattacacgattattatataacaaatgaaaattacgatactaacttcaaaaacaaattgtcacttctgttatttgatactgattccaaattaaccaatggtacgaatgagcatatacagttgttgaatcttttggtcaagatatcacagttgagttagtaaaaaaagatacaggattaatgtagtagtgtttatttttatcaccctaagatagctggttattattgacaattatttgtggaaaatgctagaaggatatatatacgtatatagatgaagaatggcatattacgtatgtctttatatatcaatgaagtcggtaagatatcaagctttgtatgtatgcaaagcataactacgttggtattgtctatgaattttttatatttttgtagcttacttggtttattttttttcagtttggattggatatttatcaaatccatggcataaattctatgcaaaaaaaaattatcaattggacattccgttttacctgaagtaagtagtcatgctttattgttgatttttgatcctttgttgtaaaaggcttgttcttaataaacattcagtttaagacattaatctgtccattaatgtaatataatacttttcaaaagttttttggtcttgagtgactaatacttcgatcaattctaaagcaaattggcttggaaactgaatttgtggcaagtatatatgagataaatatttaagtaatggatttgtattaatatctgttggagtatttggatcttgtatgctctgtaaatataattcctttaataaacgggacagatcacaagctacaattctataagtaccttcctttacattaaacttatattcgggattgaatggaatttcaaaaactaaaggaaccacttttgagataaaaaattcatttaaaccttcaattttttgtatttccatggcatgtgggtctttaggatccatacatttacctgaaccaaaaaatttaataaaattagctaatacatttaatgccaacttcatagcagatgtctcttgtatttcagcaggtgtatatgtcaataaatcagttaatataatagatagagtgtttgcattattaggagataaaagtagtgatgtgacattgttggtgacaaacgattgtagaaatgcaaaataagccttttttaataaaattttatctctgaaagagtctgtcacaataatattcttgttgtgtgcatcttttatttctattgttacattgttattattaacgttagaattgttactaataccgtccctttgattttgggccaaatgttcgttttcaatcaagctcatcatctgatgaactttgtttatggttggggttaaaaggttgttaaataattgtaagcaattttcatctttatggaaagtatggatcatttgacctaaaaatccaaggaaatcgttcaactctagcattttcaaatcggactctaaaaatagtgcaattaacttattagcaaatggtataattccactgtttaagatagggatcaatctcgagaaggcaaaccttgaagcgtctctaatattttcgtgtttactgaaatatgaaaatgttacgaggattacttctgcgatgtttgaaaacttctcaatcaaagattgatggattaactgtttactaacaagggtgttattaacttgattttccggtaccagtcctccgtgaacacctctcgctaatgtaccaattgccattaagatatgatgacattgcaatacaacttctggtgtttgaatttgactagagatacagccctccagttgagtgaacattggttttaaaacattatctaggatgtcataatttgaatcagaattagcaccaattagtaaaccaataccttcaaaaaggtacatttgattatcaaaagtggtgtcattctctgagccatccaaatttattgatgtcacttttattgttaataatgggtgaattttggcgatgatttcggataaaatagagattgagtattttggtttaatcattttaatgaatctagtgaatagataccatgttcttaatctgactctttctcttttattaaacatcgcaaagtctgagcaaaacacatttaataatgtgaaatattctttctcacctgtaatgaaattactatgtctaacaatcaactcaaagaatgcaatttgtatatatgagttatcggtttgaaatattgaactattgtttaataaaatattcataaatttaaacattaaagttgctggtggtgaggacataatttcattttttggtaaaccaaatagattatttctgatggtttcacataaattatttatttgccataatgctaattctaaatctctccaattgatactatttccattagtggtagctgttagtaaactttgtatcatattagatatattttcaagaaacagttgtggattgatgacacatatactctcctggaaagttttcaatttggatctgatagtttctgtaaactcctctatatcatcttgagaatcttcatcatcagaatcttcatctattctcatttttttaaacataacagacatcaatgtgactaagaaatttgaatgttcggaatctagaggttgtttcttggaatttattgctactgcagaacctggtttaccaccgattgcaaacgattttttcaagattgaaaggtattggcttataaatgggaaacattgttgtgttacagaatcatattcatgggacataaatttcagaattaatggaacacattggtttaaaattcttgagtctgtagctatcaatacttgttgaagttccatatcattatttgatgaattatgcaatgttgaattgttgttgttattattatttagatttatgttttgattattattcttattctgagggttattgttatcgataatatcttggcattgttccataattagggacagctcgacacctatagtagaagctaattttgctaagttttcgtgaatagccagatcatcgttatgatttattgaatttaatttattcattaagtctagaagtgataataatgacaacttatcaactggtttcatcttttttgtaataatctcacaaagacagtttgaacaagcgatctttgtctcattgtaatctaagaaattatagatcaaatttatataggttggattaataattaaattgatatcgatccatgagatataggatccaatacaggacaatgaccatgtcgttaattccattagatttgtatctacattttgttttgtaccatttaaaacgtattttagtgtattgatccagatctgcaccaatagtttgatatcattcaatctcatttggtccttcagacaattgtttttcaattgaatttcttttgatctgataaaagtttgatcagcaatttcagaatttatataaatacagattcgtagaagataatcgaggcctaaagttgaaaacgatagagtgtgagtatctaataaagaattgatttgtagtattgtaaaaaggtcgatgaagaagttattccattgattaccattacattccccatacattagcagaaacaatttagttattaattcagaaaatttacttctcatatactccggatccctgtcattacggttaattttatccttcagaatatttagaatagaatctttaattagagtaatatttggtagtatggaagcagtgctactagtagtggtattatttatatgagacattataagatctgataggatctgtaatgaaacaaatttacacatttcatcggactctaaatcattgagtaacgtgattagccattgaactacgtttggattactttttatttcatttagatattcaattgcttgtctcttagtgatagcatctgaagtaggattgttcgccacttggatagcttctttgatccttgctaacatgttaactgacacctaacaaaaaaaatgttatgtacccactcaactagttactatatttaattaaaactatagatatatatatgtatgtacgaatgtatttatatgtacgtgtatgtattatatgttctgtgtatacgtttttctccttcaaatactctttcaatacaaatattcaaatatcacatttagtgggtatttctaaatattgcaaaaaaaaaaaaattttttttcactttttgatgatggaagaaaaaatttttttctgtttattatttttttttttgttaaacgtgaagaattcatctttcaatttggtagcggaagaagacagaaggatctttcgaatcgcaaacttcaagtgacagatctgtttcacattgaaattgttggttgatcaatagtatattggagggttgaatttgtttaactatgtgttatttacgtaactctatatatgatacactcacactcacacatatacacatatatatataaatatatatatattgtatctatgtgaactatataacggcaatgatagtggctggttttctctttttgttttctcttttttactcagcggtggccagatattctctgaattgttcaaatgctctggatctgtgggagattttgttcttctcctctttggacatctctgcatatgtcaaattattagtctcaataggttcaaagattgaatcccatccaaaatttaatgagccacggcttggtacgatattcccctgtgtgataccttggaacacatggatctcaccgttcttgtctgcgtatgcaatagtggtgattgcttttgcacccttgtttggaaaggaatccaacatttgtacaattttgtccagccccatacttttcacaaaccatttaatgtatgcacctggtaatccattgaattcgtcaaacgccaacgcagtgtcttccacaaagacttcttggcctggttcaaggaacttcattgcttgcttacatttgtctctggcaatcttgaccaaatcagtgtcttgtaactcatctaaatctaatgctttattgatcacattaatcgatgaggtggagtcagatgataataacatcttgacttcttttaacttgttagcattccccgtgacaaatatgatatctctcattttcgtactgtgttctatctccttttgtttctgtttttgtttctgtttgttttagttgccttgtaatgcttctttctctgtcttcctcaccataactcgtttacgtatttaagttgatgattcaatgtcttaagatgcaaaagatgatgatgatgatgaggtgggatgaggggaaggaaaaaataaataaacaaataaacaaaaaaaattttattttttggttctttctctctaattcgctatatttgaataatatgacatccatatttgtttgctataagatgagatttaaactaataataaatacatgtttaatagtatgtgaatacacatttgttatgaattaaaaaaagatcagcgatatatataaataaataaacaaataaaaacaaaaacagtaggaatgacgtatactgtcgtcaaaacaaaaaaagcatataaaatatataaatagtttataatgaatgcacaattcttgataaattattggtacaatacaactaaaaataaacataaaataaaacgaactctcaaattttatttttatttttaataaatttagttggcttctggagcgtattccaagtcattagagttttcatactcgtacatatctaatgcaacgatagcagattctctaacaacgtcaactggatcattcaagtaatgttttaagactgggacgacatctggggtagcaatggcaccaagagcttcagcagcttcatgtctaaccattggagcttcttccattctacctaagacttcgactaatcttggaacagcagctgggttacccatttgaccgaaaacataggcgatttcgtgtttgaaaagagcacttgggtcattgaaaccagaagctaaagcagatacagcttcgctggtaccgatgtctcttaatctgaacatagctctgtaacggtcaaataatggcttgttttgatcgtttaataagtttttcaattgttcaacggtgaaatctttttccaaagatagaggtggagctgggtcagtagaagagtatagagattgttgcaacttttcagtttcagcagctggagaatgttcccattggattctagcaagagccaactcagcagtttgaatgactgctggatgtgggtcattttgtaaacatttttgtaaatcttcgacggaatccttgtcaccaagggcaccaagggcttcagcagcttcgtgtctgaccattggttgttgattggcgtctaacataacttttctcaagaaaggagcagcatataagttcttggtttgacctaaaacataagcaacttcatgctttaataattcggagtcgtcaccaaaagtttcatgcatgtattcaacagctttgttggcacgttccttgtcttccttgaagttttcagcagtagtcttcaagttaaataaagctctaaatctgttggataacttggaatccttagagactaagatgtctcttaattgttccaagttgttgtcatcaataatcttcgtgtagtgtttttcaaagttagtagacattatttagatattagctgttggttgtaatcgagtatctcggcaaccaagctaggaagaaaagaaacaagaggaaaaaaaaaaagaggaaatgaagaaggaacactgcgaagcaagagaagttctccaacaaccttgaacaaaaagggaaacaaataaagaagtcggaggatgtctgaatgtgctcctcatctcatcgcagtctgactctctctctctttatatatgtaataaattcaaggttcttttttttttggtttatttgaatttttgttttttgtttttttttttctaaaatgaaattttcattgaagtctcgagaaatttttttttgtttttatttttcgaaaacaaacgaagacaaaaaaagaaaacaaagaaaaaaaaaaacaaaaaacgatagttctattgtgttattttgtccataatactactatttttgaacattatttcctagtacggacggtaatgcattcatcagtcctaatttggaaagcagttctgtttttagcaaacagttctccttttgtccctctctctctctctctcttgtctttttttcttgaattgatgtcttaagggtctctttgatgaacttctttaacaattctgaaaattcggtaagtatttaatgtagttgatatgaaataatacatatttatatgtactatatattggtgatttttattgtcttttttttgtttttatttctgtagggggaaagaaaaatacttaatggtaacgctttactgtctgatatattttgcaatgtcttctgctacgctagaacttgcaggcttggcttgtgattcaaatgcagcttggtatcttttttgtaaatctggataactcttatctgtaatttcaccttctagcctatcattttcggggaaagtatactctctttgggatttaaattcattatctgtggtttcttcgatgtcaggttctacaaaaccatcattttcgtcctcttcaatatcactgatcacttctacttcagaattattgttattctcttgtttcttactatcaccagaactcttatcatttaatccaagatctttcattaatccggatagagacttctccttgcgtttcttttcttttgcttccttttcacgtaagattctttctctttcttgtttgtaataagtctcatactctatcactttatcatcaactgcttttaaaaatgagtcaaagccatcacctgtgtatgaggatacgccaactacgtccaactgactataaaattcttccagcattaatgacatagaattgatcaatgaattcatgtatccagatccattagcactctcatttgattcttgatcattcattattgctgtttgaaatgcttcaaaatctgtcatccattcacgtgcaaaatcttcctttttgacgtctgttttattgaaaacaataatcattggtaattttgtcttatacaaaatggaacaagcatataacatattactcatgaaagtcgtcggatttgtgtttcttggagtatcaataatatatgcaatgacggttgggaaggttgatgcaaaggattcagtgatgatcgcacctgatgcagaccaaacaaagcattcaatttgacccggtgtatcaataatgacatgttcatatttatcatttttggtctccactaatttaatcacttgatcgatcttagtactaaaaaggtttaaacttgttacaatagctccattgggacctaaaccgtaagtttccataactttgttgtatttgatagaatcacggatatcaatgttacatccatatggaactattaatacggctggatctagattgattacatatggaacttctttctttgaagaacgaaaataactgtttaatctttgcatgaaagtggttttcccagaaccagccataccaatacatataatagtacttaaagtcattttgtaaaattggaaattgtctgttttgtatttctatatgtatatatatatatatgtgtgtgtgtgtgtgtgtgtgtgtgtgtgtgtgtgtgtgtgaatccttgtaaactattttattcaatctttcaaactcagaaaatgaaagaatatgtttaagttgggatatgcgtatttgtgatccttaaaacaggacatatattgctacctaagcagttgatttactcctcttccatgtctctttggatgtatcttgcatttacgtaatgaaaaattatttacaagatgataaaaaaagccatcgaaattctctggaggaaaaaaaaaaaattaaagatagaatcatttttggaaaaattgatgaggtgaaagtgagcgcttttatatagacaataaatagtttttgactagatatataaatgtgtaggtatgtacggtagatatgcattgatagggatttagttggaataattgtaaggaggaatgagtcttgataccagataatatgttcacaaaaaaaaaagagaaaaagaaaaagaaaaaggaaaaggaaaaggaaaaggaaaaggaaaaaaccattccagttattcatacattttcaatactcttgattcaatgtttacaaaacatgattcatgtcttgtggcaattgttaaatcattagctaaattcttcatcaaagtttctggagcaggttgaccaggaccaccaagaatttgattagtattgttgcctgtagtgttatcatttatcacttgttgttcatctgaaccttgtattagattgtacaatggattcataccaagcactgagatgaagtaccacgagattgcactgacccaacgtacatccaaattttcagtcattaccccattttgtaacatatctttgaacttgatggttagagggaatggaagtttcataataacaaaaccaccaaaaaaatagttcacccaccacataatgacggtttgcggaataaaatttgccatgtttccctttgccatagtcattaaagaatcgttaatatttggatcgctgaatgggttagtcactccagattccccagtattattactgccattattactgttattcttattttgtttagctagatatgtgccactacttagaatgttgatcatttcatgacgtctagattcaaatgaatcatcatcaaggttggttccattacctaataacatttggcctctcataaaccattgtgattctgttagtttgacacgtggataaccacgatatttgggacttatcaagagcaatagattctgttttaatagaccagttaataccatcattactgaaattggcaatagtacccattttttaaaattgggatctaacattaactcaggaatcgaatagtcatcttcgcttaataatatttctaacaatttcatgattttgctgttggtatttataagtctaatgagaaacacaagaaaaagcctaaggaaagaggaaaaaaaaagaagaaaagacactgttaattataggaaccaaccagtatgggataaatatttatttcaaggtgacaatactttgctcgaatataactaataatattttcttaagtggtgtctacatacatgtctgtattatattttttaatcttctttgtgtgatgccaaagatttcgttttgtttgggagaaaagcaaaaactttttgttgtggctttacccctcgtatagtcaccgttattggtagcgccaccgttcagttaccatacaatatctacaaagacacaaggaggaacatgtattcatttgctgttagtgctggttcaatcagatgaatggcaatagaagactggactgcttttgttttgttcactgctaatgagataatactaaccatttttcattgaggagagaatcatagaccaatgaaggtttattgaaaccatagtttttgatcaataatttcattaatttctgtagatctgtctcttctctagataacgtcgccaattttagcaaccctttgtaatccaaaactttatcttcaattttgtctggactattattttgtgaagagatggaagctgaatctaaattttcatgaagatttatgctatgagcaccggatatttttaagcataaatgagaaagatttaaactgtatacgttcttttcatatagatctgaatcttttaataactgtgagagctcaattaacgatcgaattagaacatttaatgttccatgattattattgttgttcccattatttgtacttatttcttgaaatatgcatcttatatcgttatttgtttcccaacttatattcaaattatcgtatatgttattgttattattatcatcaatgtcacgatgtgaacaaacccaatctgtattcatgtcattcttcaaagtctttgaaaaaatttgagtgtatatctttgatcgtataatggacaggctgttatttttgttaagattgtgtttatttatattgtgactaaatgaccaccaacattgatctttatttaagaactctgtatcctcactcatatcccacttaaatagatatatgatgttattcatgtgtaaatattcactatatttcgttgaaatatattcaggggatatcttattttctaaaatctttatattttgccactttagtttagaaccgtacttttgaataaatcttggtgtaacaaaagacataatgcgaatagtttttttgttttgtgttattcaccccctatatctcgttgaatattctttccagtctgtaaattagttattcggaattatcactctgtctccatatatatatgagtgtgtctgtgtctgtgtgtttgtgtaattgtgtatttgtagaggtattgagagccagttatatgatagattttatttgtagtgttttctgttttttttaataagagattaatgggagggggagaaaaaaaatggactatcaaagtaatggaatatatggaagatgttatggaggctacaatgagaaagaggcacaaacaactacaaacacaagggactttactgtagatgggtggtctaaacaggtttacttattcaggattataaaagctatcattcaaagatataatgtatttttatttctgattcaaaagaagttcagaagacctttcggctgggatttgaacttattgtacataaagattttcttattatgtaatgcaactatatttttatgatgatgtagttgtgttcgcatatttcaacatttattgggtgaatgttcttttattttgttcatatgtatatcagtatactaaagtgtcttaacaagtatagtgtgttccatatattagtttgtttgtttgtttttgtggtttttagttcgcactttttccaggactaatgcaatattatcagttggatcaaaatttgaatctgttgctgctatagaagtctttccttattattattgtgttttagatgattgttatagcgatgaggtttgaatttttatgaaacatatgtaaatttccttattaggatatttacacggctggcaacagggtacaaaaagtgctttttttttctttctattaccatcatctgcttttaccttgtgacattttaatactaattattagtttagttcattacacttttgttgaggaatattatagtcattggttttgatttaaaacaatttcagattttcctttgtctgctttatcgacagataattattgggttaaaatttgacaatttggtaaattatttatttaatgtttaatattaaatagctctttattcctttttatatattttctaataaaactatgtgaatggaattctaatggaaaaaaaaaggtcataataatttattgaatttggcataatttttttactttgttatattagtgatgtgtggtttaatttattttgctaatttatttactggtcagttctatttgttatactttcatctgaatatcattaaaacattattttattcaatgaacttttatattactaccattaaaattatattttgatagataggggagagctatagaaaataaaaaatataaagaaaaagttattaaacattatgatcccgaaagagcatatttttatgaatgtgtctttaaaaaatgataaatttattgtttgtctggtaatcgtatctacagtatgttcaggtattattcctgctgtcacatcaattttaacaggtaaagtatttaacttattggagcattcttcattagattattcagtgccaaatgatttaattattaaatcaatgtctattatgatattgggtgcagtcagtttccctattatatggattttgatttcttcatggatgcttatcgctgaaagacaatgtatcagattgagatatcaattattatacacgtatataagcaaatccttccaatggtatgactcaaatagtgttaacctcctaggtgaatttactcaattgaacagatgtatcgaagaaatacggcaaggtagttcagaatcagctgctatattatttcaaagtttgatcacagtatgtactcttattggtacatctttctattattcatggtctatgacattagttattctttgttcttcaccattaataattataattacattaattttatccaaattaatcaataaatctattgatttagagaatcaggagacatcaaaagcagcagaactattagtttggtccatgaactctgtatcgttagtaaaattcagcaatactcaagatatagagatcagaaaatttaataaacttgtaaaaaaatgcaatagcatctttattagaatctgtcttttgaattctttgaattacagtttgattcggatgttgtcacttcttatgttcattcaaggattttggtatggttgtacaatgattaagcgtggtaaattgcagattgataacgttatcacctgtttccattcgtgtcttatgttagcttctacatttaatgaattatttcatcaacttatcatcctacaaaagggccatgttgccaatattaaaattaacaaatttttaaatagttttgatcctggtctaatattttcaattaatataaaaaatgatatgcaaaaatcattgataataccacctaaaccgttgatttgtgataattccttaggtatcacttttcataatgtttcttttaaatatccaactagaccacatgtatcagttttatcaaatgtcaacattaattttagaatgaatgaattaacttttattattgggaaatcaggatcagggaaatctactttacccaaattattattaaaatttttcagtggatttgagggtgaaataaagattaacggtgtgccaatagaccaaattgaccaggaatggatcattgataatgtcacggttgtagaacaacgttgcagactttttaatgatactctgaaaaacaacatattattagcctatccaggtctcgatgaacagaacgatccttctacttcaggtgcaatccaagatagattaatggaagcatgttcttttgctgagttagataatgtgatatctcagcttccaaatggattgaatacaaagattggagttgatggggtaaattcgagtggtggtcaatctcaaaaagttgcattatcgagaatatatataagagatacaccagttctgatactcgatgaatcagtatcagcaattgacattattagtcgccaaatattgatggataatataagggaatggagaaaaggtaaaacgacaatcattttgacacatgaattggatcaaattaaagcaaatgatttcttatatgttatggagaatggaaaagttgtggatagtggatataaaagtacattattaaatactgaaggtagcaagtttaaaaaattttatgaaatacagaaaatggatagatctgaagaaggttcgaccggttctattatagattcatatgattgtggtagtgaggcatataaaaatgagaaaagaacatgtttgaatcagaccgcaataatttatgataattgggagaatcctactaaaattttagagggggaaactcaaaaaaatctaattaatgatgtggtttacgaagaggatgtttcatgtgattcaatagattattcaataaatgatgttcaatacaaaaaagatggttctaaaaatgatttagatagggagatgtcatttatagatataattaaacatatgttaagagattctgataaaaaattattattgatttttggaattttatgttctttgttggctggtgtctctaatccaatattttcttttggatttagctatcttttaaacggaatagtgttaagtgaaacccatgaatccacctcacattatcttttaaagtggtcacttatactaattgccatttcaatagcagattccatttttaattttttaaggtcctttatacttgcatattgtagtgaaatttggattttaaacttaagagaattgactatgagagttattcagtacaataagtttgaatggtttaaaaaggatcaaaataggtcatctgagttatctgcagttttgttgaatgatctgagagatttacgaaatttaatcagtgaatttttaagcacatttattatttttgtggtagtctctttttgtggattaatctgggctatagttgttggttggaaattaagtttggtttgtatatcaatgttccctatacttgtgttattttctgttttatatggatttattttacaaaaagttgaaacatcatataagacagagattactcgactggaaaattgcttctttgagataatagtaggaattaagactattaaatatttacatgttcaagaccattttatcaaaaaatatgctaagttgatccagaatatcaaaaaagtagccatgaagcgagctttggtcactggtataggtatttcattcagtcatacattaacgttatgtatccaagcagttttatattattatggtttaaaactagtgtttgttggggaatatacctctaaaagaatgtttgaaactttaactttagtattattcacaattgtaacatgttctaacctgactaatcaaattccagaagtagctagaggcaagaggacagccgtatggacctatagaattattgatgagcgtgctagtactacagaacagatggattttcaaggaagatatgctccaatatttgtacaaaaaaaaaatcaacaattaataaaaattcataatttaacttttgcttatccaaacatcaagagtaaaaaggtttattcaaatcttaatatggaattatactctgatcaaacagtggcgttagtaggggcatcaggttctggaaaatcgactttaatttctttagttacaagattatattcaccagattgtgactgtatatttgtagatggcacagatgtccacaaatgggatttgagaacattgagacaacaaattggaattgtggaacaaacaccaatgttattcaatggcactattaaagataatttgttatatggtatagagcaacagatcacagagaaagatatcatgaaggtattaaaaacagtaaatatttatgattttattttatctttaccttatgggttggatacttatattaatactgatttgttgtctggaggacaattacaaagattatgtatagcaagagtattattgactaaaaaacgaattttaatttttgatgaatgcacatctgcacttgatgcagaaagtgcaaaagtcatacatgatattgttgcaatagggataccccaaactctgataatttcaatcacacatgatttacaaatgatgcaagtttgtaagaagattcttgttctaaaagatggtgtgatagttcaagaaggaagttatgaagatcttatttgtgttgaaggtgaatttaaaaggatcgtaacttggtgaaatctgtaaataaaattatatatataattctatatagttattttttttatgtttgttcctttttatgctatgaattaacatcagcattgaaaaattatacaaaatattaaaaagcacatactaaatgttaatacaaggcttctatattaaacgctttattaaaacttctaaaataaagtattttaaggtgaaataaatagaaaaataaaactttagcagataaaatattggagaatactgaatttttattatttatatatcactaggcatttatgaaattattaggttaattttttgggatttgtaaaaaaaaatattcaatatctgcttatgtaaggctaaagatttctgtatatcatatttctatttaatttacatcattttctatattattatttgtatattgtatataaagtagaaaaatgaaagtccactagtttaattttatacattaatgattacaaaatagttataggaaacaattgaaaatgtatccaacttacaaaatactagttcttgacaacaatccattatacaattaattacataacatgacgcaaacttacaatgagatattggtaatgttataaaccctcaacttatttatagtaagaacttagtggtactttaaatttctcttatttaccttgtttttcattgtgttcataatttgtattcaaggtacaatatataatgtaaataattctatattcaaattttctttagtatatcattttaaaactttttatccatttaatatggtagattaaatttatcaagcatatctttaatgatatttcaaccccaagtaacaaaaactaaagaaaagaaaacaaacatactactaaaaaaaaagagtaacattaataccttaatataataatgatattattgtatttgaaataagaatgtttttgatatgtatataaaaacgttaaattaattttcttgttagatgagagtgactataaatggattgtgataaatggaacttcaacatcttcgccttgcttatcatcggcacaaatttccaaaatcatagtcttaacatgtgctgggatttcatgtttggtaactaactttactacttgagagattggaagatcgtatctatcctttaatttctttggtggaaagaatgatgcatataacaatgaaacaccatatgataacatagtgatttctaaaccttcttccttttcaaagtgttctaacaatgcttttagtgtaatatcaccataaatattaaatctatcccatatcttatcatatgtcttatcattatatttaccttttggagaggcaattggctcggaaaagccaaaaaatggtagagccaaattaacgaacccatttttgtattgttcaatatctgtcttttgatctacaaccttatataattctaaattaaccaacccagttactaaagaagtagtagtagcaatagctggaataatcctaccggcaataaatttagttttttgacggtctgctagttcaatagaataattttcagctctacagtttgagcatgcagtgatgaattgaatatgatggttagtatcatcatccttttcaaattcaactgcattcatatggaatcctcttaatacaaatggatctggtaaagaggcaaccaaggcatctaattcatcacctattggattattggcatttggaacaggatcttcatcattcacttgaatctttaagttagtgattgggacaaattcgggaataggcatattgtcaataattttcttaaaatggtcaactggtaaagcttcatcaactggaatatcataattaaaagcacgaagacaagcacccccaatgataaaatccaaatgatttggattattaatatcaaagattaatggagatggggcacgtttagcaccagaccaaaatggttcaccattagaagtctttgcatcaagtggaaagttgtacaatagttgcttaatatcatgattaaatttcttttcaaattctaaacgagcccatcttacacaatcgtcgaaagtttcaggtctgttatttagagaatcattaatagattctaaaatacctttaacatcgcctgtttgcttcattgtttgttcaataaagttgtcttgtgttaagtacatatttacattttcagcagcatcagagaagtaaccctggaatagtgatttagcccaagcaatagtgtgatcaatcttacttgggaaagaacgtaaagtacacaaaggaatggacttttctggtggatctctagaagaagaatatgattcagttaattttggaataacaacttgtgtgttacccttagtacctaaggttcctgattctaacaaaggtttaccatagaaaacacaacgacgatccacataggtacgagcatctacattatctaaagcgttagtgacaaagtctaatgattgccaaaatgcatcatcaaagatatcttcggtttcagtacctactttatcaatcttaggtgtgatttttcctgctaaatcttgattcattgcaatcacagattctgcagccacttcagatttatttcttccaacatctttagatctaaataagaactgtctgttcaaattagatttctcaatagaatcattatcagtaacgataatccctcctctctcacctgaaccaagacccattaaagcccaattctttaacatttcacaaccaatagcaccagagccaacaaggaaaactttagaattggccatctttctttggaaatcagcaccgaagacagcgatttggttatcataacgagacccaattggtgctgtagtgatttcatttcttgggaactcctttgaatcaggtaatgattccaaagagtcgaaatacatgtattgtttcaatggtgtaaatttaccagaacatgctttcaacacttcttgggcaacaagaccaccaaagaaggcgacaacacctggaatatcacctctagcctgatatgataattctttaattaactttttatcaactggagcgtcgccaaggacatttggttgttgtacagctaggtcagagactaatttaattagttcattagcatcttcttcattcattggtcttggcaattgaccattatgttttatgacaaaataatgcaaagcttggaaacctaaatgtagttgaccacttctatcaaacttagcaaagtccgagaagataaattctgggtttgatatagaatcttgcaaagatttaaaagacatcttaataggtactttaacttcagtgaaaataccacctttcttataagtaccgtatttttcaacattacctatcctgaatgcgaatggccccaatacttctattttaaatagtgtgccatcattcaatttttccaaaccttcgacttcagtgaatctaacatatttcccatcttctagaccatgtcttgtatcgtctaacatggtaacagttccgtctggttcaatatctgagacaataccggaacgtggttcttcacctgtggaatctatcacagtaaatttatcaccgaagtctacaaacacattaccgaataaacctctagtctcagtagagataaacttaataccacgcttatggcaataattgttcaatttaattttatcttctagagacatagtctcagtggccacaataacttggaagggttccaattgtctttcttctaaaattggttcgagtactgagattggcacgtatgcgtttaattcagccagtttaatcttggagacttcatctcttggcttacctatatcggcttcagtgaagaaaaattgcgttgataaatcttctaattcaatgggtttattgtcttgtaaagtcaatgatttaacacctgccaatgccacattcttagcaatttcaatacccaaaccctttaacccgatgattaagacattagaattttgcattttcaacatagcttctttaccaaggacataaagttgacgagagtaaagactttcgtcaatttgatcgtccttaacgttgtttgtcatgacagatgaactcatgctaattgtttttcccttgtattatattattttgtaatattataagaataaatttgtttatttccccacttactattctttctgttctaaatttctcctacaaaacagtaaaaaggaaataaaattctttttttcttttttcaaaagatacaaacctacagatggataaacaacctaccactaataaataatttggattgtatatgtatgtgtgcaattaataaacataattgtatagtggaagtaagtaaaaaactacacattatatcccttagtaaacgtaacctgtttttttaaacattctttcagtttcaatgaataaatattattagtaagaaaaatataaaagaattttcaataaacaaaaacagaagaaaataaaaccctaaacattcgtacataatgatattagggcattcacgactttgtctcatttttctcattttttttcactttctcttgcattgatggaagacctaaaacaaaattgctaaggttcaagagaaataatataataataatgcatcaagaataaatgataagaagagttgatgacgcaaaaaaaaaacaataaaaaaaatagagaacaacagctttcctccaaatcagcaataacgtccaagctctactaaaactggactaattaaagataaatcaacactctcctgaatcttttctattgatcaggttcagttgtccctatcttagaaactcatcatattttggaaggaaataatctagtccaaatacaattgaacagtatcaaatcagaagcaaaaataaaaaaggaaaaagaagaaataccacataatgaatataaattaatatggaatatgcagaaagctatagagtggtgtatccacaaaaaccaactttccaatacatagcacgatcccaagccgatatcttgatcttataaaaagatgatagttctgttccaacacagaaagcgaaatttgaaggaaaaaagaatatgtctgctgtttaacgtcaaaacattggtgggtgatcctttaaaacatctctctctctcttttatatatatatatatatatatatatttttctttatgaatgtgggtacaaaatcgctgtttgtatggcaaaaacgaaaaatataaaaaataaaaaataaaaaagaaacgaaagaaaaaaataaaaaataaaaaagaaacgaaagaaaaaaataaaaacaaaaagaacaatagaccctccacatcattggtgtggtgtatgggcgtactacaagctgttccttttgtttttgtgtttgtttttgacatttcctatttaagtacaaaaagtgttttgttttgagttcatctttgctcacgtaatacaaattacaaatcatatttttcttttgaacacacttatcactggcctatatgtccaatataatgtatctctctttttattatatatatatatatatatatattgttgtctatacacataaatactttttttctgtataccagtcaccgttctatagaaatgtgaatcataaccacacatacgtataaacacacacacaaaaaaaaaataaagcagaaaatgaaaagagggatctaaagatatggttattaacaactacacaatgaaagaaagcagacattttcttactgtttctgtcctactctactctttcctccaattatctattcttcattgtataaaccttcttgtgcctctctttctaaacgtgcctcaatttcttttaattcctgttcacgagcaagtaactcttgtctttttagtaacagctcttgttgaactctttcctcaaatgccttaagtctttcttcctccaatctgatttgttcttcacgagccaaataagtatcgttgtcattcataggggcattgtatcccgattgatatgtgcttgattgattggatatttgttttgtttgctgtccatcaaagtgttggtctgttggcgtgcttgtattactgttattggtcatggaattgctattaacacccaacctaactatttgattatttccttttaatcttgagtccatgttattcgctgacatgtttttacctccagacaatgcctcagttctataattttcatacaatatttcgtgagtgtattcttttaggtcatgtaaatgagatatcaacaaagtgtttcttaatataacaaaatccgaaaaatttgtatcctctacatcaatcgtaccccagttatattttctaccacgtatcatagttttcgtctcactatcttcaaaaacatcattagaacctatcattgacaatggaatcaaggaacgcaaatacatgtttgtttcataatcctcttgagagatttcatcctcgtcaaatgggaaatcgtaaattggtaaattaaatctgttaatatcttcttggatcaattttttattagttcgcaattcttcccttgtcaaggaatcggctttacagataactggaataatattaactagtgtccccaattgtctaatgaattctacatccatttccttgagtccatgacctgttggctgaatcaaatatatacaaacatggactctaccgtctttaaatcttgggtttcttctcacacgactctcttcaagtaaaatttcatcgtattgatggcggatataatcagatataatctcaaaggaggatgtgttatctaacgataaaccaagccctggtgtatcgataatattcagctggattttcacaccttcatcgtcttccagttcaacggtttcctctcttagttgcaaatcaatctctgtggaagtgtcagttggtaaaaggatactgctggacgtgtcgaccacttgctgtccacataatgtgttgataaaagtagacctacctgatccagactcacctaccaccatcacagtgaaattgatacctctttttaaatgttttctctttcttaaagcagatgaagcttcaataataccagacatgtttcttttattttcttttctgttctgctctctcctctacttttattttatttttttttttcttttttcaatataatctttattctttaattcttcaacactaactatttaaacatatagagagccatgtcaaaaaaaagaaacaagtttctattgaagtgaatcctcaacaagaagttaaatcaaacttcgaattcaccatcttaatattttttctgatcttttgcactttttattttcccgtttatttatttatttttttcttttcttttttacttttctttttttctttttactttttttaattaggcggaaatcggaaaaatgttaataaaaaaaaaaaaactaaatccgcccatccaaccacagtattttaacggaataaaagattccgttaaaaatatttggagggatgaaggggggtagagaaattaataacaacgttttgcagacagagaagaaagaagaaaagaagcattagttatacttcatttcttagtagcttgaatattagcaaaataaaaaaacaaagacaaagaaaaactttacgtttgagttcacgaacgtctccttttttctttcttttctctctctttttttttctgttttcccatccttccccattgaaaaattaaatcgtagacaaaatattaaaatcataaataaagaaataatctcaataagtaatgcttttattaaaaacaaaaacaaaaacaaacaaacttttatataatttcctttttgtttttttttttatttaaggattaatcaaactgttaggtgagattatactagtacatctacattattattattattattattattattattattagaagtccattttcatcaacaaaatatttcgttccagttagcagttcaatatatttacttgctgctaaagatgatgagtgaatcattagattattaaatattaatacaactaatttggatctcttcattttcattattgaaaagattcaattctctctgtcaccaatgttaaagattctttgacagtaacaaccaattacgaaaagatgcggaaattacaggaattagaaacctcaaactcaaaacacacagcacgcgggttggtttccgattgggcggcatctgctacaattccgccaaaatgataagaaaaaacaaaaagagaaagatgtgagagaaaaatggaagagcagagcatttttgttttgttttgttttgtttgtttttcgatctttttgacgtgaaatatactaatgactaatttatgagcatctttcttatattgcgctctcatatattagtatgcaaatcgaattagaaccctttctgcttcgtacccttcattcatacacacacacacacacacacacatatatatatatatatatatagatatattaatcctatttgacttctttttcaaacttctcacgcaagcagacaaacatctgagttatcatatttattcatttatctcatatttattatatttttttgttttctttttttttttttttttaagtaaacaagtaaacaaaaatggtacaaaaacatgttgttatgatcgataattatgattcctttacatggaatatctatgaatacctatgtcaagaaggtgcaaaagttagtgtctatcgtaatgacaaaatcacagtagatgaagtagcctcactaaatccagatatcattttgatctccccaggccctggtgccccagccacagattcaggaatctctaaggattgtatcagctatttcgcaggtaaaatcccagtctttggtgtttgcatgggtcagcagtgtatgtatgaggtctttggtggtaaagtaggatttgctggtgaaattgtccatggtaaaacatctcctataactcatgacaataaaggatttttcaaaaatgtcccacagggaatcctggtcaccagatatcattccttggctgggactaaagatactttacccgatgtattggaagtcaccgcaagaaccgagagtggtgtgattatgggtgttagacacaagaaatttaccgtggaaggtgtacagttccacccagaatccattttgaccgaagaaggccatctaatgattagaaatattttaaacattactggtggtacatgggaagaaaacgctgctaatcttaataacactataaccaacgcaaccgttaatggttcctcaatcttagatcgtatttataataaaagaaaagaagacattgagatacaaatggataccccaggctttacatatagagacctagaagcatctttcaaattagggttggctccaactgttcagaattttgcagacaggttgatgaagtcaaataaaagagctgtcgtcctttctgaaattaaacgtgcttcgccatcaaagggggatattaaccttgaagttatcgcttcagaacaaggtttgaaatatgcacaggctggtgcctcagctatctctgtcttgaccgaaccacattggtttaaaggccatttacaagatttaataaatgtgagaaaagtgctggacctcgagtataaaaacagaccagaagatagaccatgtgtactaagaaaagaattcatattctccaagtaccaaatcttggaagctcgattggctggtgcagatacagtattattaatcgttaagatgttgactcaggatgaattaaaagacttatatactttcgccaccaaggagatgaacatggaaccattagtcgaagttaactctaaagaagaattagatcgtgctttgaagattggtgctaaagtgattggtgtcaacaacagagacttacattcctttaatgttgacttgaatacaactagcaaattaatcgattcaaccccaaaggacacaatattgattgcattatctggtatcttatctcctaaggatgccgacctgtataaagaacaaggtgttcatggattcctcgttggtgaagctttaatgagaacaaatgatgtgaaacaatttatccaagatttatgtaattaaagtaaatattagttacagtatatttatttttattttttttattctatatagaccctgttattactattttaatattactgttaattttaatataacaccttcatatattaatatttctgaatattcttatttcttaatattagtatttgttttatctattttgattggtactatatacataagttggaaaatcaacctaattttcttcatcaaaatagatgtactataaaaaatcatctggatataacaaataacaaaataaaccagtaatacacagaacaccgtataacaaaccatatatcaaaacattagataataaaataaataaacataaactttacatactaatcgtaaatacgatcctgtaaaaacagtcaaaaaaaagattaaaaagatcaagaaaaaaaaaaaatagaagtatcaaatgtttgaaaatttcaaaatctaaaaagactagtgatcatcatggtgggagtaaataataataacaatgaaatatttgaatggcaggcttattctctcttggaagaagccgacttcatgtacttgctacttggaacaaacttgaaattgtttgatttatcacccttattcttatatggggtatttgattccaagaaaccaacctcaacaagttttggccaattaacatattgcatcccgttttggaagatattctttaatgataagattaccgccactaaagaacctaagaaaaataatatattctttctgctagtgaaataattctttgggaaaaatattgtggccaacaatactgtaagagctgcatacaatatggttggtagcatttgagttaagaatggtcgtttatcagtaaatggagacgtcattgcaagttcgtatggtttaaaattaccaaggaacaaatcataggaatcctgtcttggcccatctgtcaaattattctgataatatctggatgctgaattgataaaatcattaaatgcacccatgtatgtacgcttacctgttcttgtgaaatctgtttttaaagcaccagtacctgaatatgaaacactaacagcatctgcgttatcagcccaaagattctggaacattgataataatgctttgtcagattcccaaaggcagccctcaggagtcactttagagacttcaaattccctttgtaaaatccaatgtgccaaaacagattgaacaacgttagttctatctaaacaatccatacaattggtcctgactgtagataattgattattaacaaccttgattgttgtggttccatcagcatctacaattttatggaagaagtcattgtttgataaacccatttcagataattggttgagcaataatttgactctatgccattgcattttacgacattcatgatggaaatcgaagtatatgtaatgcaatttcggattatttaatcgattaacagcattttcatatgcttgtttaacaggtaactcgtgacccttttgattaaccaaattgaccaaataattatcaccatacaattcaacttgttgatcaaaatgtttctttgtggcttctaaagaagaattatcacctaaaactaaatttggtttatattttaaattattaatctctgcccagtagactggaacagagcctcttgtttgtaaaaatgaaaagacatcacaagtggaatctttattgttttggacaattaagatttgttcattttcattataattcccaacattacccccgttgtctaccccacgacggaaatatctggtacctgctctgaatctactgcgtcttgtaatcaaaccgatagcaattggggtgttgttgaaaattgtgtcaagaactttagcatacccatagataacaggttggatgaatctaccaatcgttttatctgtcagagcaacagatcttaaatcttcagtgatataataattccaaaagaatctagtatctacattgttccaatgatatgaagtaatgtttcctaaattttcatttctttgtaaagaattagttaaatcataagtataggagaaatataaagtggcattattcatttgagtctccaaaagtttcaaatattccacatcatcagaatcgattaggcagttagtagacttgattgggatgatagaatgctgggccaccttatagatgatatggccaccattcaatctcccagtctcctccacagtgttggcaataatagcatatttgttcaatttgagttgaataaaacctaacaaagctgcaatcttggtgatatttgcctggatcggaaattcctcggttggaatagattcaattgactggctttgtgcgtttactaggattgcattttccttatctggtgaagcacctgatatggcagtcttgaaatatagtccttctaaagtctgaacaaagagtaaaggacaggacattttggtagaacggaataaaacaaactagaacagcaacaaaacaaatatatatatatatatatatgaaaggaataataacaaaacgaccaacctcgaaaaaagaaagacagatatgtaatataatacctccttccagctttttctctatctatcaagccgtttagtgtagtcttaattgaaaatgaacaaataagacaactagctgagaagtacacctgttgaaaagaaagataacacacacacttgcaaataactattataaatacagcacagaacttgctgtctagacctgtcaataaagatctctgttgttgttacgctagctaactctatttctctctgtacattccccaattcttcgctcgagattctttctttaggaacgagggagaaacaaaaaaaaaaaagaaacgacaaattgcaataaacaatgacaggaatcctcgatcaaacacgaagaagaagaagacgaagaagaggtcaaacaggggaaagcgtattttgatatagtggttgattgctttgcactacatagaacgttaaattgggttcaattgtcagtttgctaacatactattcttattgacaagtattctaaagtttgtaaagggtttctcatttggccgttaccccttttgttgttctacaattaagtaaatattttgcagagtaaggaacatttatttgtgaaacttttcatacacatacagattagaagaaaaaatatgttgccccaatatcaactaagttcaattttgagaggacatacccaggatgtgaaagatttggtagccatagatagtaataaaattgcaagtgtctctagggatggagatgtcaaagtttggaataagaacgagtctaatgatggaaatgaccgttgggaaagtactacaatatattcaaatccacattttctaaacagtatctgttatgataagaataaccaagttgtcttttatggtggtaaagattgtttaatcaacggacattctatttttgccactttaggtgaaacatctgagcccttatacacactagtgggacataactcaaatgtttgttctttaaatttacatgagaatgaattaattagtggtagttgggatacgactgcaaaagtttggtccaatgggatatgtaagtatactttagctaaccatgagggtccagtctggggtgctaaaatccttcctggtaacaataatcatttcgttacagtagctgctgacaaaattgtacgtctttgggaaaatgattcaatcttaaaagaatttaagaatattcacaatgatgtaattagagatgtggaaattttgaataatgatggcacactatttgctacatgttctaatgattccacaataaaaatttttgatttcagtgggaatgtaaaacatgtattagatgggcacgagagttttgtctataaaattaaattcaataaacatacaaaccagttgtttagttgtggtgaggatagatctttaagaatttggaatttggatgttgaaaatgattataaaccatccatcactcaggttataagactgcccgcaatatctctatggtgttgtgattttttaccaaatggtgacattgtggtcggttcaagtgataataatatctatatcttcacaaggaataaattacatcttgcatcaaaacaggagattgaaacttttaaaaaaagcatagagactactgcattaaattcagctactatggggtttgatgaatccaagatttcaccttatgaaatattgcagacaaagggtcataaagagggtcacttggttatcgtcaaagctcccactggtatcttagaagcacatcaatattcaaatgaatcttggactaaagttggggatgtagtaggatcctctagtgcaggtagtgataagaaaaaagaatacgagggtgaaatgtacgattacatctttgatgtcgatattgaagagggaaagccacccctaaaattagccttgaatgtgactgataatccatatgatgtagctgataagtttatcataaaacacgagttaccatcagactatagagaacaaatagttcaatttattattaaaaatgccacagggatttcactagacaatgtacaatttacgtctaatcagcacactgtttcatctcaactagcctctatgggcaaacaaatgaaggttttgcctgtaaagacttacttgacaatgaagtcttataaggcggaaactatctttaatggtattgtgaaactaaatacaaaggaacaaactttcaatgatgaagatttggcgcttattggaacatcactagaaaatttaaacagtaattatgagatcttatacgacattgccaaaaaaatttttaatttatggaccaacaaattaccatcatttgatattatcagattaatagtagataaattaccagactcgagcaatattcttgattatatcaaagaaggattagataatgaagatattaatatcacaatgcttacagtacgcatcttaacaaactgcttcaataacaaagcgtggggtactaaattaatgccaagtcctgatgtttataattctgtttttgaaacaattggcacggtatatccagatgcgaccctacgtcaatcacaaacattagctatctctgttgctactcttttactaaattattcaagtctaatagtccaagataattcaaatcgaaagagtttagacattgtaccagtgttagcagatgtcatcaacaacaaatatggagttctggaagaatatcaaacgtcggaagaagcggcctatagattgactgtggcatatgggaatttatctactgtagaacctacattaaaacaatttgctaaatctgtcgtatggttaaatcaaataagaagaaagtacagtaatatccccagattccacgacattttcaaagatttagaaattgcgtgaagtggtcaaggttttatccacatatcttttttccttttttttatctatttttatcaatagataaatgtgttttatttctcacggtcatccttgcttacgggccttgttcgtgttgaaaacttctttatactatcatacatctgtatatattcacatttatatatataatgtcaatacgtatgtattcttctaattcatacattgtttcccatctgtgccataataatgttctcttcattgtgagaggcctcttcaaaaaattaaattctaaagaaatacactctatagcaacaaaaaaaaaaaaaagagagagaaagagagatggaaggagaaaacacatttaaaaacaacaaaccactgataaaatcgttggtgataacctatctacttcactccagcggtaattaaagttgtgcagaaggttattactacttctacagtttgaatatttgtatatttctcctgcgttgttaatacgtacaacatatcaatagtgtcagacagtacctgcaataattggaacaaccacaacaattacattattaatccctatattagttaaaaatggatcaatctttacaacaagtatgacctcaattttttaaagaataaacagataagacaaccaaccaacttaacacagtattagagaagtccacattactaacaacgcatcaatggttgtgatacaatctagtattttgagatgtctctctctctctctctctccccttatttcccaatctattattttgtttatataggaaagaccaacagatgaaccaaaacatcatactaccgtatgtaatctttcaaaagccttctctatgggtatatattaaccttgggttttccatatgatctatttatacttaaaaaaagaaaaaattgccattatatgtaacctaagagaattttagtaaacccatagttccaataacttttaggttcttactatctagtttgaagttgttctaattactaacgtttcctttcatgctttttcttttttatatgttacagagataccgtcgaagagatttaagagctgatattttagggtcccgtcttgacaagccatctctcccagcgccaaaatacaaaatcaagatgtcacatatcccattaaatgtatcagattatactcttgatgatttggttaaagagtttggacataaaccgctttattcaaaagtctttgatactaaagaagataggacttttataatagaattcaagagtcttgatattatgaacaatttcgttaataaatacaatggttatgaaattgaagagaattgtaaagtcactgtggaagtattcgagcagaaatccaggaaacaaaaaggcagattttctaggagtgatttatcacactatggtagtcattataaaaaaacatcccagagtcaactccgtcgtggtatatcaaaaccgacctctagaagacaaaccgcaaaaagacccaccctagaagaacttgatgctcaattagaagcgtatatgaatagtggttctaccactccggctacacaagaaagtccccaccaagctgaagagcaattttcaaccgagaactaaaagaataaggtattggaaagtgctagctactgtatattactacatactaacgtaaataaaggtaactgtgtaaacatatataaagatatttattaaaatatcttggtgtcccaattcttaccgtcctgaaaaccatcaccactattaatcagtttgtgtatctgactaaaagtggtaaaaaaatcagaatgactcaaacttttcattttatttttttaaaggattccaaagatcttttacagaaattaaagcacctacagttgaaagactaaagacagtgatcccaatgtgttatgcaacttgcctttttatttacacaaagagaggaatagaactcaaatctatacatctacaacagtatgactattattgataaaaagaaaaatttaattcgaatagctatcgatcgtggtgggactttcacagacgttattgctaatcccggctcaggaaaaccagaagacgatttggtgatcaagttactttcagttgatcctaaaaactatagagatgccccgttagaaggtattagaagggtattagaaaaatttgaaaataagagtatcccccgtaatgtacctttagacatttctaacattgcatctattagaatggggaccacattagcaaccaactgtgcattagagagaactggcgaacgttgtgctcttttggttaccaaggggtttagggatgccttattgatcggtgatcaaactaggcctgatatcttcgacttaaacatcagaaaatgtaaacccttatatgaaattgttgctgaagtcgatgaaagggttactctggaagattacacagagcaactgccatttaaaaaatccatagtttctaaagaaaaaaacactttgactggaaagagtggtgaggttgttcgtatattaaaggaactggatgtgaagtcagttgaaaatttattatcaaatatatataacaaagggattagatcaattgctgtatcctttcttcattcttatacatatccggaacatgaattgttagtaggcacaattgctaagaagattggttttaaacatgtttcactatcctgcaaaacttcacctatgataaaatttttaccaagagcccacagttctgtagcagatgcatatctaactcccgttattaaagaatatctcgacagtatatttcatggtctaactaattgggaaaatacaagtgttcaatttatgcaatcagatggtggattagtagacagaaacaagttttctggtttaaaatccattttatcaggtccggcaggtggtgtagtaggctactcaactacttgttatgataagactaataatattcctttgattggctttgatatgggaggcacatcaactgatgttagtagatttggagataacaagttggaacacgtctttgaaacgaccacagcaggaataatcattcagtcacctcaattgaatatccacactgttgcagctggaggcagttccatactttcatgggaaaatggtatgtttaaagtaggccctggttctgctacggctgatccaggccctgctgcctacagaaaaggtggaccattgactattacagatgctaatctatttttgggtagattagtcccagaatttttccctaaaatttttggtccaaatgagaatgaacccctagatttagcaaccacgaccaagctatttaatgaaatcacaacagtaattaataaagacctacattcaaattttactcctgaagaagttgcatatggtttcatcaatgttgccaacgaagtgatggctagacccattagagcaattactgaggctaagggccacattgtatcagaccattatttaatcacttttggtggtgctggtggacagcatgcagttgcagtagcggaagccctaggaatcaagactgttattgctcatagatactcttccattctgtctgcttatggtatatatttagctgatgtggttgaagaaagacaagaaccgtgctcatatgttttaggatcaccagaaaccacctcttttatcaatgataggtttaataaattaactcatgagtgtatctccgaattagttaagcaagggttttccctagaagatatagaagtacaaaaatacttaaatttaagatatgaaactactgaaacagccttaatgattatgcaagtgggaataaattgtgatttcaagtcacttttccatgatagttacaagagagaattcggttttgcatttgaaaacaaaaacatcattgtagatgacattagagtaagaactattggaaaatcgcatgttcgtgaacagcactcagtggacgaagagatgaaagctatcaagaccttcaaccctgttaatatatctaaggaagctagtttttttaaagatgtttattttaatggtggttttatacaaacaccaatttatagaattggtaatatgaaagttgggacagttgtatctggtcctgctatattagctgatggtacccaaacaaatatcattccacctaatgcagaagcaactgtattaaaagcccatatttttatcaagataaaggaaaagcatgttttaaaagaaaaggaaaaggatgactttgttgatcctataatgttatctatatttagccatagattcatggatattgctgaacagatgggaacacaattaagaaagacttcagtgtctactaatgtaaaggaaaggttagatttttcttgtgcactttttgaccagactggtggattggttgcaaatgcaccacacgtacctgtccacttaggatctatgtctacatgcattgcagctcaagctaaattatggaaagggaaattgaaacctggtgatgtaatcattactaaccatccagatattggtggaacccatttgcctgatatcactgtaatcaccccagccttttctaaaaaaggtgagctattgttttatgttgcctctagagcacatcacgcagatattggaggtattcttcctggatcaatccctccaaattcaaaagaactatacgaagaaggtgccaccatattctccgaattgttgataaagaatggtatcttccaagaggatttggtatacaaattatttgtcgaagaaccttcaaaatatcctggctgttcgggtgcaagaagaattagtgacaatattagtgatttgaaggcacaagttgcagctaacacaaagggtattcaactaattgaacaattggttgatacattttctttcccaatgaccttaaagtacatggttgctatccaaaacaatgcttcagaaacaattaaagacacactaaaaaagttggtgcagcattttggttcaagtatatttgaaggtgaggattacatggatgatggttctgttattaaattaaaagtgacgttagatgttgatgctgaaaattatatcttcgattttactggtacctctccccaaatatatgggaatattaatgctccaattgccattactaactctgcgatattgtattctttgagatgtcttgtaggggaagacatcccactgaatcaaggttgtctagagccaataactattataatacctagtggctcaatcttgaatccaaactgcggtgctgctgttgtaggtggaaatgtgctaacatcacagcgtgttaccgatgttatattaaaaacattaaatgttatggcagattctcaaggcgattgtaataactttacttttggttgtagtgatgttatagatccaaagacagatgaagtaattagaggttttggatactatgaaacaatatgtggtggatctggtgctggttgtgattcttggatgggtcctggatggaatggttgcgatgcggtgcataccaatatgacaaatacacgaatgactgatgttgaggtgtttgaaagacgctatccggtaatattgagagagttttcaataagagaaggatctggtggtgctgggaaatacaccggtggaaatggtgtaattcgggatgtagaatttagaatccctgtaaccgcttctatattatctgaaagaagagcaatcgctcctcatggattgcatggaggtaaagatggtcaacgtggacaaaacatatggatcagaaaagatacaaacgcgaccattaacattggaggtaagaattcctttcaagctaaaccaggagatagattaataattatgactccaggtggtggtggcgtgggtgaagtgtgattacaaaagccattttttcattggtccagttgtttcaaagtctacatagaaatatatgtgtatatagttatgtaaatgagttatgatgattttgtaatgaattatattatacgataacacttattaaataagctattgtaataaataatgatttttttgtattagccaatgggattatttcgttatatgcctgcatattttttttcgcaatgggaacagcataaagaaaaaaaaattaagttatttaagatgactgaaacaaatacgtattgtttacagtgatgatagataaaaaaaatgaattgattaagagtataataataaaaatattaaagagatatttcttatgtaaataaatagtcatagtgattcttctttatttgtatcatagatgagttttagatcgattctttcaggtatagttggcttaggatctggttgtgggttaacatattatttattaaaaagagacaatagtgctggctccatcagcaatccaccaattggtagtaacatctctttagtcccaaatagtggttcttccgattcttctttagttcaattgaaaccaaaggaattatttaaatatggctttcctggtccaatccatgacatcgaggatagataccagtatatttcctgttacaacagacaaacaagaaatccatattgggttcttgaacacattacgccagaatctttggctttaagaaatggtgataggaaaaattccttctttaaagaagatgaaaggattccagagatgtttagagctaagttaaaagattattttggatctggttatgatcgtggtcatcaagtaccagctgcagatgctaaattttcacagaattctatggatcaaactttctatttgactaacattagtcctcaagtgggggtggggtttaacagagattattggtctcattttgaatatttttgtcgtcaattgactcaaaaatataataatgtaagaattatcacaggtccactatttctacctaaaaaggatgagaaagatggcaaatttagagtcacctacgaagttattggaaacccgccaaatgtttcagttccaacccatttcttcaagttgattgttgcagagaatccaaaacaaaatccaactagtgataaggtctctgttgcagcctttgttttacccaatgaacctattccgaatgaaactaagataactgattttgaagttccagtcaatgcattagagagaagtacaggtttagaactgttgaaaaatttacctgaaaataagacagttccattatgtaaggaagttaagtgtcaattggttattagagaatttaataatagtgttaaatcattaccaccaaaataaaataaaaaaaataagaataaaaaaatttttccccaaatagggatgcgtagataaaatccaaataacaagaatatattctgtatttagacattttaagtgtaattgtattgtattttaatttttgttctcttggaaaatatattacatatttatttattcattcatttatttttttaagaagtagattacatgttacttattaacttccttcctttattttctttccttaattatatataaaaaaatgatataaaatggatcgttatgttacttgattagtactagtatagaatagaaatatacaaaaagaaagaacacaaaaaaaagaagaaatcacacacacatatacatatggttttttttcattctattcattattcttatttaaaagaatcttctaaaaattatctttcgtacaatatattttagatcacagatcagtgccattttttatattataaagaatgatgatcaagactctacttgacaaaaaagaggaaaagaatcagaaaagttttgttattgacgcagtgtttaaattttaaaacatttcgttcatatcttctttttctggaaagtaataaccgtttttaatttaaatatttggaaactacgaatagagaatgttaatcttaaccattagttgaaaaaacttatgaagaaaaagcagaaaacagcgcattttttattagttttggatgttcacttttggatatcatatagaaactctggagtaagcgtgtcacactttaatatgtaatacaaaattaatacataatattatctctcctaactatctatatatagaggaggcattaccaaaaataatgatgataatataactatcaatacactattatacactaaatatacctttatagaaccttataatatacatttataatcctaccgctttatatctatgtataaatatggcttctgaactcctaaaacttatcaaaacttttaactcaaaactattattccaacaaactttatatattcttacaggtcttccttattttatgaatattttttgtccaaaataaagaatattaaatataaacaaaatatgtcttttcttctaacaggactttattgaaaattataattctatatcaacgattctaagtttggttgtttactcttgacaaaattctataatgctctatttatggtgttatagaatatatatcaattattgagcttttcctaacttgtctactatacaatatagaattcttactacatattattctgatttacagactgcatcttcttaaatctcaacctttttgagttctacgatcgtccttcatgaagaaatttgtattattgttacttttattgtttctttcagtaaagacttttagtgatcttttaatattggcagtggttcaaacagttctactaggcactattgttttacccgagaaaatgtccgactttgtgaaaccctgtattagtaaagaaacattgtgccggtcatagattaacaatgaaaaactccacttttttctttcgagatgattcagttttttttttcttttgttttttctttcttttttttatctattaagtaacagcagaatggacaaaaagaacgagtcaattattttttttttgcattaggtaaagtcatcattatgagattcctcattttaaagttggatcataagatgatataaattaaagcatttttttctaaataatcgcaactactttaacatggtggcgaaaagttgacgtaccatgattctacctatcctgtggactttattttgttccccaagaaaaagtgctaatttgcatagtgctaaatgtgtgtcatgaaataattaactgtcaaatttttttttctctactgaatcattgcaacttcaatatcaaatagtgtatcatatctagtcagtttctttttcgctacaaatatcctacagtatattgtgatgtccatgtatacaacattattggcttctttgaagaatactgcgtttgctgatgtcttggaatttttgcaaatatacaactttcctgaaattgttccagacaatctatttcccccacaatattcgagtgtttccgataaatccaaatacataatcgaatgcacagaatttacacactataaggaagcaaatgaatctgtacagtctaacgatcaactatcagattgtatagaattagattctgtccaatgtagtgaaataaaactttctaaagacccatttcttataacatggaatggtaaaaacgatccagaaataccatataattggagcaattttaaaaaatgtttaacggtgggtcaattgctttttgcttcttggattagttacactacatcatctatttatgttccgggtcaggacgatattgaaaaggatttcaactgctcgcatgtggtgggaactttaaatttatcgatgtttgttttaggttatggtattgctccaatgatattatctcctttatcagaagtggcatttgttggacgtcaaccaatattcgtttggacttttttcatttttacattcattcaactgggttgtgcgactgttaataatatcgtagggctaattattctaagattcttttctggtgtattctgttcccccttattaactcatgcgggtgctagtatttttgattgtatcactgaaaagtattcaatgattatgctagcctcatggtcattttgcacagttttagctccagttacagctccattattaggtgcgtgtatgacagtagcaaaaaattggaggtggatattttggtttttattttttatatctggatttgcaacttttcttcttctttttactctgcctgagacatcacatacagcaattttatcgagacgtgctagaagaataagaaaacagacgtgtgattcaagatattataccattcaagaaaaaattgactccaaaatgaaaattagtgaatttttaatcgatactttatatagaccgatctgtatgatcgttcaagatcctattgtactggcattcgacctttatttatccgttgtctatggggtgttcaacctttttttcgaagcattccctattgtgtttattgatgtttatcatttttcattgattgaattgggtttatcttacatgggatattctgttggcgcggcaacagctttcatcactgtagtaacattcacttataaagtagttaatcctagtagaaaaaatgggacgtttactccagaaatttatttattacctccaatgtactttagttggtttttaccattagctctgtttttattcggttggggttctgctgcacattggataattccaattatatctgaagcgttcttccttactgctacagaaagtctatttcaagcaacattttcatattttgcagagagttacccaaatcatattgcatcatcatatgccggtaatgggttaatgagatgtttttttgcatttgcatttccactgtttggtaaagccatgtataacaaattagctattaaaggatatcctgttgcttggggatcttcgttgcttggattcattactattgcattagctgttattccttttgccttgtacaaatatggtccagcattaagagccagatctaaatttgcagattaaaatacggtttttctttaatattttgattaaatagaacggataggtatatcatttgataagatactatgtcatacatatggttatacttttggtaataaaatgcttacagttttaagtttggtccaggcgttaacataatatgagataatctaagggatattattctggaattactaactgttccattgttttataaacataatatttaaacgacagaacatctttttttaacatcaacttttgatatctgaataaagacaactagcatattccatatatggaggctacccaatgctttcttgataacacgtatataaagttttttttttgtcagcatttctttctgcttagaactgtactaacaaacattaccattgtgagtaaatattttaaatgtttaaaataaaatagaggattttttgacctgggatcattcttctagtaacaatttatttatttcttgtacgagaggagtatgcaacaaacatgtgcaataaatatgtaaggaacctatttggaaatctgatagatacgcaattcagcgggtgacacctgagtttctgggtggaggatttccagggagtgataattatatcagatattgtcaagaggcctttgactattgagagatatggcaggggtaatcatcttatttaaatacatcttagtaatgatattaagaagtaactcttaatatcatacaagaaaaagaaaacaacaaggagaagtaataatataacatcagggttattaattagtaatatatagagcttacgaaagagcgtttatagttgtactaattgatatgatttatccatttacatacgacaactcttacatatatatagtatatacatcttacaacgaactttcgtgtagccattttttgcatttcgctcgaattgtgataacatccaggggaattgtgacatgactttgtcttcagaaacctggtaatataataatgggttctactgtttttaaaacttccactatttaaaagagaaatgcaaagtggcacaagtcagtcataggaaatcttttttttgaacggttgctattatccattgttgcagatactattactccaccagagctcttgacaactatcgaagtaagtttaatcatggcacttatcaaaaaagaatctatgctacatttttggaccaccttcgttcttagagttattttcatagcagcatctatactgttgattttgtggttttattctataactgttgctcctatatttggtggtaggtcgtggaaaaagaaagccattattggagctgttggagttgtgctaattacagctacctttgcaaaaacctatcctgttctttttaaacgtgcacgttggacctttgctgtaggctcaacattggcaggtttagtgttagcagctggaagtgtagctattccatcctggacagcagccatatgcttagctttttcaagtcctgcttgtgttcctgttacagattctattttgattgctgttgatgttgcaattgctgctgctattatttggaaaaccgaagattttgaaatgcataaaaaacggagtacagctgctaggtaagtttctattttcggttctgatattatagctttgttacattattttatagacacaacgcaaatttcctcatctacaagagaggcaattagttttgaacttgttggagagattagtcaggttaatcctttgcaaaaacgagacagtgcagttaaccataattttatccagtttaatactacgttcggggttcatattgcagtatcaccagtgttatctattgaggagttagcaaagcatattctagttgctgagctaggtgtgccttttgggaatagtagtttggtaaaacgtcaagagttttcggttaattgggtatcttatggttgggataatgcaaatcatgatttttcttaagagtggtataactatgagggcggtaatttcgattctctattagaagatgctgttcaagacgcacttggcaaatatcccgattggaagtactgcgtggcaccaaatgatttaaaacgaggtgaagcaaccaattatcaagataatccaggtgtaggcacaggaacagggaatgtcatgcacgatgaagtctattttaatacttatggcggtattgatggttattataataacaacgaagacggagcacagaattccagtgattgctagttttcatatttgtttcagttaactttatctcttttttgttacttacggactcaatatttgcttttttttaaatataacctgctagaatgatttcccacctacttaagaagtaaatcactacttcaaacaagagaaatgtttgttttgcacaatccagtgttgtgaagatatttcacaaaactcaaaattataagaaaaagttataaaaaacttttccaaatgcaaagaatatataaatgaataactttacttattgaattctcggtctggatgaagcatatacatacattgtgtttttatgtttcatttatagttgtataattgtttattctctggacagagatcaagggaaaatagtctataatatcattgaataataatataaatattgttcgtaaaatatgatcatcaatgctaaagaaatgtatattgatactcttcctccagaggaaatgattactcaatattctatagtttagtatctgctaaaatctcattgttctatctatttctttttagaagattctatttcatagaaacagaactcattcggtagaatctacaacttctcaatatacacacaactgtccttttatctttttccgttttattttttttctcttctggaatccaaattttcttaaatctcaaaaacattttcactcaaataaataactcacacagatatggaccgctctacagcgcaaatacataaacaaaacagatatatagacagttcctcagttgtaatctacctactccaagcatttgtgtgatataaatataaacatacactaccattcaatatgatataattatgccaaattacatctagcagttattcataaatatccttattccagtcctctgagatatcgtaaaacgtagagaacacattcacaacaatccacgtaataaatatagtattactagagaatgtgtatataaatggaatacacttatttctatgttatgattactttatcactatgagtatttaggaaaacatgaacacatatactcattgacatcttccatttaaatgatacaatctgatatcacacattaatcccacatagtaattactttagtgccactatcatgaaatgtacaatacattcatacgaatgaacctcacactataattatcaacactgtacaaactaccattgcattccataaagaactgtttgtcattgcttgtcgtcaattggtaaaattcaataatactgttatctattcttacaactctaacatcgtatctgataattaccaatattaaatcaaataataagcatggatgatcttgtaatcaaatggtaattacaaacaaaaatggttcaagtatgggatatacaacagaaaattggttgtttactgatttgcattggatctgtggaaattattttacctggattactatatatatacagttggggaagatggaacagtatttgctttgagtgttactatcaacattataattgatatttcttactttatacagtgttatctcatttacccaaatcaagaacatcaacatagtcaaagtaagtaattttcaagacactctcagatatttaatatactgaagcaagatgttaatttctatgaaacatcaactttgaacaaacggctaaaggttcttttattatgtctctttttctggattaagattaatgttgtatggtgtattcttgccataagtccttttttttctgtgagttacacgtgggtaaagaataaaatattttactatacattttatgtataataatgcacaaaaatattgaataatcatctgggttttctttcgcaaaaacatatataggttaatatctagtacagtcacgtagatcattctccattggttctagtttgccttatttctataacgaattgtaatacatgcaataagttccacattccattgtttttagttacaattgttattttttcagtaggtcgtagtgcaaaatcatgttctattgaaatgttccagttaaataagattctaatgatgttaccagataaaaaaataaaggcaagtatatcttctgtttttatgaagtctcaaaaaagtattggtgtatatcagttttgttgaaaattagggaaattttactacaagatttattagtaatcaagttgagttatttatacatgtatatgtatcgaaatgattaaaagtcgaattgttgttttgttaattaaaatttattaagataaagaatgagaaagagttgaatgtacaatacatacacaacagcttaagtcagtatatttctaaaatgtttgacttcttagatagtaagatgttattcaaaatagttgtaattattaagcgatataatactagtgcttgtgtataaattaagtgtaatagtgtaaaagtgttttgagtgatgatatatttcttggttagaatataaatatttattaatgttgataacttcaaaaatatcttcaataaataacggtaatagatttagagattatcatccttttttatcttatgtcataatcttatgttaataatcaaacagttcattttaatataatgtagtatcataaaataattctgttaaattaatacaattaataatctagtagtaaaatgtttataaccgagaatgtaattatagacataatggtagaagaattttaaaacatttataacactgtagatagtacaaacatgttggttgtattcttgttttattaattatctttatattcgtaatattgttatttaattagagatagtatccattttagagtagacactatattagtcttagtataataattagcaagccattgtttatagtcaaaaattgtttagcttgtttattatccagaatttttaaagtaataattcattttaatatctattctagtaacaaagagtaatagaattattagttgatcgggttttgaatggaataaataatattcattatcgtcgctacaatacaattaatgcatccatgttagttagatagatcattcactgttatcatgttatagttagttttcagtatgttcatacaattatcattctatatatataaagtaatatatagagtcgtttcttttgtattgaaggcattaacgagaagtgcatgaatgttcttgaataatcgtatttatatagtagttatatcacaataatgcattctattgatagatatgtaccctagtaataatatatgtattaggtgaattgttgtgaatgtaatctcatggttaacaatatctcagttggttgtattgagtatatgtaaatataggatggtataattacattatatcaaataatggtttgctaatgttcaaagttatgtgacatgaaagtgagtggatcatagttgattgttcacaagccagtgtgtctatcctgtttacatatctgttggagtggttgttattgttgttgattcttgcaaaatattttttcgattttaaaaaaaagtaaggtgatcttggatgggattgatagtcaagaggtgatggtatgtgatattgagagtaatcgagtaaaatgtgatgtaatatatatcgatgatagttataaaaaaggaatatgagatatcagtataagaagacctgtttagattaagttaagagtaaacaattcatcagtataatttgttatgttattttcatttaatgtgaatgtgttttatatcgatggtaaatgcatagtctaacagtgatgttatagagttattaagtgaataaaaatataattaaagctagctggttgataagactagttcagttcaaatagatgttaatgttgtaaataatgttgtatgttatggaatacactgtttcaaaaaattgtattagagatcgttagtgatattatcatagtaaacatagatataagtattaaacatcatagtaaattgcaatctagagtaattatggtatgttatattggaatattatatattaatgtaatatttaatacagttattgaataggaataaagacaattcagagagtacagaaaaggtttgtgaaactgtattaaagtagttatattatcagttgagaatgtacattcacgtctagcttatactttatcatgctgttaagatcaacacaggtaaactcaatacattatatctctcttttaattgatgaaagatatatccatgttattttttttttttttgcttttcatattttcattccagagatattgatagtgtcacaaggaagagaagaagagaaacataaggaatggtaatatagagagctagagagtagtagaatctggtggtggttataaaaatgttgaagtagaacatttgtaaatttggaaaatagagagtgaaattattatgtagttaaaaaaagataggatgggtgtggatacaactacccgactgcactattttttgtattaaatatgtcgaaatataattagaattatgtttgatgatctaaattcaccgtactaagtaattaaaagttataaaaatttatattaaagaagattcgaagatagattccgaagtcttgcgtcaacatctatgaagcaatattaatatatagttggcggctgctttgtacaatttttataagaatctatcatctcttaatatttatatgtcgttctatatttgattttttcttttccgtccttctttttttgtttgttttttgcatatataatatttaagtatagttattaatttcattcttatacaaactttttgaaaatctttaaaaaagtccagacaaaaatttgtaaagattcttataaataatatacaaaaatatagatattaattatatccataaacgtttacgaatcacataatggtcaattctaaactagcaaattcattatttttggctgatcttgaatacctaaactgatcttaagttattttattttctgggcaaaccttagaagatagaataccaaccttaaaactaataattacctctggcacattctctcaacaatcagagatttcttaaatgaaattttcagtaatctgccgccaacgttaatttgacgatcatttgttcaaatacacttacgacttggcttcaaagttttggctactccaagtctttccccttaatatagggtgttacctatagactgcgcatttcagtattccaaatagagcttcttacgaaatttaatacaactaaccattgtgaagaactcaaattaagaaatcaaaaattaggatagtgaaaaattctagcattagcatctgcacttaagatgttactaaaaatcataactatgattaattagtataacccttcatatataaattacgaatatctttttttatcttcttatataatggagaaaactaagagtatcatgaacaatatttataagaaataattatttacaacctataaaaagaatttgtgaaattattacttcgtcttcttatcttaatcctaatataacattccatcttcgagacaaacaatctttctcatctatatatatatatatatttttactagcctatattataacaataccatcagtttgattttaagtaatacctatcgaattatcttgaatcagcttctaaaatactagttaagatttatttaataatttttctatcctaaaaattaaagaatataacgaccatcatacgctcaccaggttaaaattggtaaaaaaactcaaaaaaacgataataagaatagaatgcacgaaacagttgatacgtttcttaaaaaaagtacggtattctttataaatatcatttattttatttttcttcaatagttagacttaagattaagacaacttttcacaatacacgatttaaatctttaattcagactggtgcttataattttagtaatgttaaactagatttgcttctatgtcaaaaaatcgattaaaatatgacaccacctacaccatcacacttgttgacggtgacagttcttcgtcttcagaagttgttgatattgtcaccccatcttcatccaccttatacactactgcctacaaccatctaaggagtaaaaataccacagcctaacaaaaatactatattttcttttgtttttctatacaactgtccaataaaaataaaacaaaatccacttgtttatattagttttaaccaatatatagttcagagtacttctcttttaaaatcattttaaagatacactcaaaagaatacttcacatagtatactataaacatctactacctacaaattcttatattttaacacatattattttttaatcataatacttctcatttctattttatactttccataaaatgtactggaaaccctctataaaagtgtctatcctacacactgaagtatcgaaagactggatgagttttttctgtaatgttaactctaccatctagccttaaacaggattgttacatgctacaacaaggaggaagacttacgtacctagtctatcttcctccattaggactccttttaacagttcttcttttttcaaatatttgcaactttgaataacaatgcgatctcgaggaaattctatccactgaattcggaaaaacaaaacaaaatctaagctttttttaatggacatttccctttttgggataaagccgtagtgtttttgtcataataatttttactctattgtcaacggctttcgagctaaatctcacgaaaaatatctgcagtcagagaaaaaaatttttttcgacttgtaaaagaaagcaaaatctttaatcggacatgtaaaatccttaaattacacaactactggaatcctgttgtaggtagccatttttcttttgaagagacagagattagtcctttcaatcttgaatttcacatgggttagataataaaacaccaaataaacataaataaatatctcagaaaacttcccaattaattacttttgttaagacccctgctagccaaatctgttttaatgatagagtgttttctattattatatttttgaaacagacatccaacaattactacaaatcacttcgttttccaaggatacctgtcttcgattttctttcatatagatcaaaacaggttatatgggactgttgtaataatagtagtcatgcttctgcttttcaataaatcattctaaaatcttctggatttgtcaaaatccttagaaaacacagtcattatgaataatataaagaaactcaatcaaacatacaacaaatatgtcaaatatatctgtgtaaatatagaccatctcatattttttagattttcaaatattatcattaattatattaatatgatattgtcttcaaataatcagtgatacacttaggcattatatgcaataaaaaacacaacaaaacttttttcaagataaattttatactaatggggcgatattatcaataaagtagcagagatttctaatattacacatgaataatcattcaaatacagaataaacacaagttacagcgagtagtcttcactgctaaattaacacttggacataaaagtggttttaacaataaatttgaaagataaaatctcttttgagccatatattgaagatgatagcttactaaattttacaattgtaacataaaactacaaatattttatggtaatttggatactacaatatgaaaatttgttattaaaaataagcaattaaacgaaaggaacaacatttttactttgaattttgaaaattaccaaatttaaggaatattgatgtcctatatctctgctaagtgtaaattaaccttagtatacttggcaattaaaacttgaaaaggactctaataaataaatatccttagtcgctagtaattattaaaacatctctattatacgtaaaagcaccaaattcaattcaagatatagctaacttacatttatctgagtattgttcagctttgtgatttgttataaatctattaaatctttttagtattcctaaaataacaatagcaatatacacttgaattattttaattttctttttgcctctaaaagaataaatatactcaccgatattaatgtcgttactatgtctctccaagatactgtaccgtaattaatttttgcttttcactatgtttctaaaataatacttctaatacctcctcaaacttataaagcatgaaaattttgatggtttcgtagttatgtaaacattttcctattatcattagaattagagcttttgctcttcaatgaattaaaatatattcttaggacaatatgctttataacataatataaaagatgtttacttatatctgttagaagtgttttttgtttttttaaagatctctggatatctgatattcaactgtaataatataaaagaatctcataaatgactgtatcaattttccctattaattgaatactaattagaaatatgcttgggataaatcaatttgaacttacaatttcatttctatgaacttcattttttttatataatacaggatacgacaatctcttgttatactaaattcttatgggtcaaaagattttgtatatatcataatgagtatgttttgggcattatttctgttaactataataaatatttatacaataatgaatcaactacttcttataggttgcggattgcatacattccaaactagaagaaatgattcacttcctaatactacataaaaacattgatgcaataacatcaacatctaatacgattaaaaaaatgaatgtccaaatttttctgatcaaaaacaacagaaaaaaaaaaaactgtttttcttgcgctgaagtaatgaaaaaatgcatttctttcaaagtgaaaaaaaacatttaacataaacggctttatctactatggatcgtcttaaaaaactttagcttacgtattgactggctattcttctcaacaacaccatattagttttcaaagaaattacaaacttggtattcactagaattttccaatccatttgaaacaaaaacaataaataccatgaattattgaaacaatagctatagcatattccctcttgatgtcaaatcacaattaaaattcataattaaaacgtttatagtattataattacctctgcttgtttggaaacatctattagcccattttacgatgaaagcaagtagaaagtttcatgtgagtgagatatttctgttttgccctcaaccaatttttattttgctattatgtggtcgtttaaaggaaaatttctcaatgtttgttccaaacaacaacaggcaagatgtcatgcacaaaagtagtctaaaacaacatatttgtgccagttgcataaatgtcaaaaaggaaattgcaagattcgaaaacaaaactactatttaccatgaaattatgcaatcttaaattcgactacgttattatagttaaaaatgccaaataagtgaatgcaaataatttctaggctttagcatctattgcaactgaaatattttgataaatgataaagattggcagtgttgtattgatgctaactttagcaagttaaacttaaatcaggttccatagagacaataacttatgtggagttatattttaacacatatgatagaattgatgattagcacagtagtattgaagatagttggtttatcttagacaataatgaattttatatctaacatttctattacttgagccttagacaaattggatctccattttattaaaaactatgcagaaaatatatatggtgtttataaacaaacacacattgatccttcactatttctttttcttgaaatattttcttcaaaaagttgttttaatgatctacaaaaatcacttttaaataaaaaagtagtgattatctgcctattattcaacagttttgataagtatactaataattaaataaaaagaaaataaggcaaaagctagtggatattattttacaaataaaataacagagagacttttcttacctatggttataatattatatatatctagaatctttattgctatatcataataaatagaattctaaaatttattagttcaccattaaataaatatgaaatccaacctttattaatgcgtttaaataatttatatattacaacatccaaaatttttcacataatactattaatacttacaaatgaataatatttaatgacatagtttttggaaaagataatacaaagtgaaatattaaaaactaatgggtgtatattatatttctattattttgtatattttattaagtcttaggatataattagatgtaaacatttcaagtatatataatgacagtttgatattatttatttcacacaatacatcataactaaaagttagattcttataatacgtagttagatttacaataagctgttaataatcagtggtgtgtatttgttacttgctatattggcaatcttacttaaaatatacactaccattagattaataattaattatactcccaggaagtacattcctataatatttagtaactttggtggtttcctcattagaaatgtcttcaccaagacgctggatagattatcaccaagtggaataatttttggtttatttgtttgaacgttatcgaggtctacctgctcaggtagttccacaaggtcgacagtctctgggtctttcgatattccttttactttactcccattcagcttagttctcttagatatagggttcccattcagtatttgattcaaagatacagatcttttcattttcacatctattggagtagtttgattgttttatattgtctctttagagtatcaaatatgatcattgatatatttcagcaggatcttcagatatttggtctctacgatagcattgaaggattccatatagatagtgacgtattcttcacaactgaaatgaaaaaaatatcgtccttgagacgcataaagttgtatttaagaag

SEQ ID NO: 23 - DNA, 5335 bp, Kazachstania heterogenica
  source 1..5335: mol_type = genomic DNA
atgctggattgatatattaccgatttgagtaacatgtaaatatatcaaagaagaaaaatgtttgttttgcacattcaacgttatggagataagatcaaacagaatcaaaataaattaatatattatgaaaaattgccaaaaggtaaacatatataagtagacaactttacttattaattttccaatctggatgaataatatatatacattatattgtacggttcttgtatatttatataattattaattcccaatcaagagattgagggaaaattacaatacatatcaatataataataatacacaataataacatattgtatgatcaccgacgctaagaacatgtatactaatattattcagccagaggatggtagcgttcgtaaaaattcgtttgcagagatcaaatcgaagagtgaaccagtcactccgatccaaggcattcagggatcatatgaacaaactaaacagaacacaaacaaagctagtgaaaacacacaagctccttcttttgttccctccacatatccatatccatatccatacccaggtactccatcatatccacatgggtatcactacccaccttatcctatgggttatccacatgcattcaacccatactattattatcccccaccacctaacctatacttcccaccgccaccgacaccagtacaatcacatggtacaccattacaatctaatggccctaccttacatgacactgatgaacattcagtctcttcatactcgagtaaccctatatcaactgttactctacaccaagtttctgacccatcagaatttccagactttctacaaaactttcaaaaatatttaaatgatataaacttatccaagatatgtataaacacagcacaatctaccattaccgatcaagaaaaacaacatgtaacacatatttttagattatatgttaaccctaaagcatatcctatgtggttcaaaaacgaactatcggataactatgtctctttgtttgatttaattcaatgtgccattataaaatacaataaaaggaatactcctactaaattatatcagcaactacaacacatccgttacgacccaaagtgtgatcctatgttgtttaaaaaaagaataaataatatgatacaacaagcaaaagattacaatatcgctattccagataggattttatgtgatacgatcatacaatcgttacacggaccttatcaaataattgttgataattacaatcgtaactttcacaacatcacattgaatgacattttaaatgatattatcaacatccatagtcgtcagccacacccctatccaaccaaacatcacaccaatacattatcttctaccaagccaaccaatcaactcaaaaagccaaaaaataaaaagaaaatttcaaacattcaatgtgagcaccctattgaagaaaacacacaggatgactccccagaaaatcttaaagactatctagtccttgacactggtgcagaaatttctgttattaatgacatagaatttctaaaccatattaccgatgctaacgttgtcctatatgccgcaaatgacaaaccaattcctgctgctgctagtggtataatatcactaaaatttcaaacccattccaaaccttacgttataagggctattcatgctcctgacatatcgaacaatttcattagtacataccaattggaaaaagccggtattgtagttgacactcgtcatcgccaattactagacaagtcggaacacattctgtctcccatcattaatgtgggtaagtacatgtgtatacctcgatcaattttacaaccatctaatcaacaatctacttcatacagcataaacaaattaggtatcaaattaactgtaccttttctacacaatttatttggacatattaatgttcatgatattaaaaccacaattgatcgaaagatgatttctggtatcacatcagctgatgtcgattggtctggtattcactcctttcgatgtacatcctgcatgaaaggaaaatcaactcgtcacaagcatattataggttctcgtataaaatatcaaaaagaatatgctccctttgaatatatccataccgatattttcggtcccatgtcacatctaccagtcggaacaccttcctatttcatcagctttaccgatgaatctactcgttttcgctgggcttttccattatattcaaaggattcacaaaatgttactcgcatattttcaaagttcattaatatggtgtctaatcagttcaagaccaacatcctatcttttcaaatggatcgtggttcagaatttacaaacgatcagataaccaaactcttcgaagataaagggattaacccaatttatactactgctggtgattcacgagcaaatggtgttgcagaacgatttaatctaacttttttaaacgattgtcgaacacttttacaagctacaaacctaccaaattcgacttggttttatgctgttcaattcgccacactcatgcgtaatgcattttttaactcatctattaaaacttcatcaagagcaaaagccggtcttgcaggtctggatgtgagtactattcttccttttggacaagaagttattattcacaaaggatcaacaacatccaagctttctcctcgtggtgacgacgggttggcattatgcccatccacagtatctcatggatacttaatatataataccatcaccaaaaaagtggttgacacatccaattattcaatcgttaaaagttcaccatcaaaaggcaccacaccaaaatccacagtcttcgacactctaattgctatccacgactaccccgagaacattgaaccagaatctgaaccagaaaaaattgacattcctactgagaaccaattaccatcacatactaccgcactaccatcagttcaacactcctctgaaaacaatgacacccttaaagaagttgacaatctaattgattccatcgtacatacaaactccaattatgaatctgatgactatacatcagaaaatgaaagtgataatgaaaacgaagctatatcatccacttcgcccattcaagcccagccaatagagcacaccccattgggtggtacaaatttatctaattcctccaatctatctcctgattccacttctttagctaatccacaaaaagacgctgtgttgggtggtaaaaataccgatgctaaaattacgaaaccatctagtaagaaaaacacagacgcttcaagactagcaaaaaaagctgaagaatatttaacgaaattctcaaaagaatacaaaataagcaatattcgtgctaatcagagatcaaatgaattaaatagtgcctcccactcaataaactatagagatgctataataaaaaatactaataatgactcaaaatatttgtataaattggcatatgaaaaagaaatcgaacagttaaaaaaaatgaatacgtgggacgaagaattaatcgatgataagaatattgataagaagaaaataattaatacaatgttcatattcaacacaaaaagagatggaacacacaaatgtagattagtagcaaggggagatcaacagaagaagggaacatataatgaggaagcaacatccaatacagttcatcactatgcactaatgactgtactttcaaatgctttaaataaaaacaaatacatcactcaattagatatttcatctgcatatctttatgctgacctagaagaagaactatatataagagctccaccgcatatgaatttgaagaaaaaggtcgtgcgattaaaaaagtccttatatggattgaaacaatcaggagctaactggtacagggagatatccaattttttgacatcaaaatgttgcttaaaagaaatatcaggctggtcatgtgtgtttataaatgagaaaattacggtatgtttgttcgttgatgatatgattatcacatccagaaaaatatctgacgcagagaattttatatcaaagttacaagaaaaatttgatacaaaagtcataaatctaggactacctacagaaggtaaaacagagtatgacattctaggtttagaagttaactatatgtttgataaggaactatcctttggtatggaaaaatccttaagagaaaaactcccattattggatgtgcctctaaacaaaaatgggaaactattgaaagctccagggcccccaggaaagtatattgaagaagactatgtaagtatatctggattagagtacaagaaacaagtaaaatggcttcaaaaaataattggcctagcctcatatgttgctcacaaatatcgttatgacatattatattacgtaaacgtaatcgcatcaaacacattattcccaaacaaagaagttaaagaattagctagacttttagtgcaatatctatgggatactaaagagaagaagcttatatggtgcaagaaaaagaataacgaaaatcaaattatgctaaacgctattgctgatgcatcatttgctaagcaaaaggaattcaagtctcaactaggttactacattaaaattgatgacaatataatcgctggtaaatcaacaaaatcaaaaacaactctaacatcaactgctgaagcagaaattggtgctattggattatctattcctgtgttgaaatacatcaaattattacttaaagaattaactgcagataaaataatcactacgattgaaacagatagccaaccggctatggcagtaattacttccaaagaagataaatcatttaaaaataaattctttgggataaaagctttaaggataagagatgagataagtgagaataatctaagagttgcaagaatagatacagcaaacaatattgctgatattttgacaaaaccagtgacatacaagagatatagtaaattaacttcagaatggattgtatgagcagtccaaaatttgggtggtatgctggattgatatattaccgatttgagtaacatgtaaatatatcaaagaagaaaaatgtttgttttgcacattcaacgttatggagataagatcaaacaaaatcaaaataaattaatatattatgaaaaattgccaaaaggtaaacatatataagtagacaactttacttattaattttccaatctggatgaataatatatatacatcgtatctttatgtttcttgtatatttatataattattaattcccaatcaagagattgagggaaaattacactacatatcaatataataataatacacaataataacatattgtatgatcaccgacgctaagaacatgtatactaatattattcagccagaggaa

SEQ ID NO: 24 - DNA, 6451 bp, Kazachstania heterogenica
  source 1..6451: mol_type = genomic DNA
ggaatttggagccttctgcgtccatggtaatgatagacatcattaagttatagatacttgttatgtttttgtattaaatacctgtacatatttattatatagtgtattcagtatacattcttttatttactttaagttttcttttaaagtttttcatttcttttcaaatcttcgaaagacatatttggtgacaattaaaatgttttcctgatattatgtacatccgtacaccacataatatatagaaaaactaattaaaaataattcttatgaaaatgacagtaataaactctcattttccaacatgcccctttaattggtttttcttataacttcctcctgttcactataacttaatgatttccattaccagcattccagaggacagtgattggaagcaactctttgggtgttaattcatgttgtacaatcattcttaatttatttatatctttattagtagtggattttgttaatggatctgcaggattttcttttccactgatttttcttagacttaagtctgaatctaatattctttcttttaatctttcaattctaagtcccaaaaatttggttcttgctttaaaataatcttgtttcaaccagtccaatgctggtttggaatcagtaattacacatattcttatgtttttaaaatccatcatcttttctaatttcaattttaatagcaatgcaattttctcagcctgatttatggcatctaattcagcttctgctgatgatgtacataaaattgatgattttttgaaaatccatggaaaaaattgtttcctaaccatattaatgcaccacatcttgatttaagatcaaattcagatgctagcgaagcatctgaaatcaccgtgatgtttgatatattttctacttcttctcttttaaaaacagtctttgtatcttgtgttttataaacatattttagtatttgttcggttaactcaattacctttttatgaggatataaaactaatcgagccattttacttactgcacattctatatcaattcttcctctagacctaatataatttaatttaccgattaactcttgtaaatatcttactttcttcttgtattcctctttagtcataattaatttatcttgttttggatttattttaaacttatcaatatctggaatcatttcttcttttaatttatcatttaatatcattggatgttccttttctaatctctttatatagctagtcatgcttaatgctatctcccctttttcataatcataattcaaatccattcccaaaatatctgtattaagcatattatttttcattccaccaactatttttattgagaattgtttttccaatgtatttataaattcatctaattcttgatctgttctagcagcaattatacaatcatcaacatatgctgctatcattaaattaccatcctttgaaacgaataatccaggtgagtaaatattatcatatagacccataccattcatagactcttttaaggtttcattccatcttttagggctttgttttagtccatacaatgcctttcttaatggagtaacctttcttgcatttttggatgttgtatatacaactcttcatttaaggttgcatataaaaatgcatggttgatatctaaagtctttaatttcatcttcttattgttagcaataatcaatagaattcgcaatgaatcaagacttaaaatggatgtttcaatatcattataactactgcttgtttgttgatcgcctctacaaacaattctggctttataagttccatctctcttaatcgtaaaaatagaatttgttcctacgattttatccttttgtattttacttttgtctatggcaatattcaaatcaattactttcatattaactagattttgtaattctttattatacgcttctatgaatttaatcttttcttctaaattttgattctcagttatagcttgtttataaaataatgctctaatctttctttctggaacactttccccccgtgattcaggtgtgaattcttcccatttttctgtaggagtaatataacgaattatctttttcttcttaaaaatcttcttagggtgtaagtctttatttttttatcaatattagttaaattaatcttggggatattatcaagattggtttcttcgaagttgttttctaataatcttttctttaattctttaattttaggtttccttaaggaagtaaagttttttttgtccagtctgtagtattggttgatttagttaaattatcttcctcttttggtaatgtagatactagtgaaacagattctttagcatcataatacttttcttgttcttcgtcaatcttagcaacactaatatcattactttccagtgccttttctctttctagaacttgttgtaaactgttattttcattgttcttttccttttcctttttgtgttcagtttctatcttccgttttataaaatttttaacattgtcattaatttcttgatgtaatttattattagttgatctcaatgattttgatgatttctttaaattatgtcctatctgacctgttatgtttgtatccattgttgttatttcttcatgtttcaaaatattttctgcgccttcattattgcttaattctatttctgatactttccgttgttcaacattatctttttctttttgtgtgtcttcttgttctatattaagagtatcaggttcctgtagtgttatattgaggtcattctctaagactagttgtttatcagtttctaatttcttttctgttgtatgtgtttcgttaagtttctccaaggcatatgctttactatgtttaaatgagtcttcaataatgtttgttttaatttcttcctgttcaatcttatttttcaatatatccttccatttacttaccaatgagtcttgcatgaaactagcttgatcattttcttgagatttatatgtgctgtttaattccggatattgttcgacaccagtatttttattattatcattataattagtttctggttcatatttgttcacattcagttcatcttgttcatcctgttctgtgtctacagtattttgagaagtaatcagctcttctcctaatgactctcttgattccgtttcctcgctgatatgttcttcttcaacttcaaaatcgtcaaacaattcatctaatttaatattttctatgcttctaggttcaataattggcgttacatcgttaatttcttcttggatgtcatttagtaaatgttctttaactcttatttcatcttcgtgtaaaacatctaccagattatcatgttcattttcaaaatctgatggtaacaatgttactatttcattctcgtcataatcaatgtcatttatatctccaattttgtttttgacctcatgtaaaaatgtaccaataatatcatatcctttcttctcatttaaactgtgatttattgtataatctggtaatatataatttgtggtacttatcactcttttttcttttggtacataaaaataatatccaaaaccttttggatccttggatagtgttatagccctttttcctggtgcttctgtttttctgcttctgtaatcccatatcatagctggggcaccaaatggtatgaatgatcttaatttaattttcactttatgttttgatattttcattaatggtgattctccaacatttttgttatatacgcagtttctcacattcactgaagctttagctgcatatgtccaaaaccttaagggaagtcttgattgtagcaataatgttcttgtgtcctcaataattgttcttatacctctttcagctcttccattagcttggtgatcttcagtagaagtatatataatattaataccgttttcgtgagctaattcttcaactacgtgattgtcaaactctttacccctatccatgattaactctttaacttttacatcgaattgtttttcaatccaatttatattgtatccaatttgttctcctatttcatttttatttttcttgatatgggttgttgcaataataaatctcgatacactatccaccattatgagtaaatatctttctttaacatgctcaacaggaccaaatatatccaagctccaagaagcacctggttccttttgtgaagtgtagtgattcatagaaccagtataatgaaagtgtcgatgtaatttacctgaagcgcatatctcacaccatatatttttagaatttttttatcatttatcattttcacatcatcaaaattgttcatttctattgattttattattccactggctggaaaatgatttaaacgtaagtgagcttctaaaagtgtgatattaggttttatcgctaatggattaataggtttaactgctctaattatcttatcagtcatcttgacagctataattttatctgtatcgacccatatggtgtttcctaattttaaggttttcgtatcaaactcattttctttgttcactagcgattcataccctttgtctaaggtaatgccagtttcttgatatagtttgtctgcagacaaaattgttgcatcttgttttggagaatagtatgctgtaacaccaattattttatttctacctcctttaattggtagtatcccttctccaagtatttctattgggtttctatcatcccctacaccccaatattctggtccttttatcaatgatgaaaagtttaataaccagtctttattgtgtaccaaatgtataccagcagctgtatcaataactactttgtcattagttttattttttgagtatgttttttttatctttatattgtacttattatgtatatctttaatgtttgattcttttcgagtctgttgttttttgttcttttcgattttcatattcttttctctggaatctatgttagtattcatgttcttcatttctttcttgatggtattcagttcatttaccttttcttttattgatctagtgttctgattcattgatttcaccaggcctaagtaacttcttctcttccttgtcttctttcttattataatttattcctttcaagtaagtattgttattattgatttttctacaatttttggcataatgtaaacacgaattacagttaatacatcttctttttcaatacgggttaaattttttgattcacagtattctatattcatcaatctaattgaatcccgaattgcttttatatattgttcaacattcaattgccttaagtcaccttttaatttaccggttaaaaaattgttaatcatttcttgttttacgttttttgttaatgattcttcaatttttgtttttaaaaagttatcatttattctatagaaatcatcttttacatggctccatttctctaagttcaccatgtacataaattccttggtaatcctttctggttcagtacagaactcatcaacaatcagttctttccacattctgtccttaactcttctagggaattcttcacctagtagctgtttaataaacaaaatagcttcaatacctgatttttcatccaagtcaaaattttccatatcatcagtcatagaattaataacaatgtttctaattatttcctcttcatttttatctatttctattttacctgtcaattgtgtaacatcatcaaagttccatgattttagatatctggataatgatctgaaccagattggaatttcctcaattttagataatttcttgttaaatttatagttatcattttcatagtaatatttaataatattgccatctaaatttttaaaagtataataaaaaccatattcatctttctttgataaaagtatgtaacctttataattatttatttcttgattctttggaataagatctatcttttgttcaacatctatatttttttctatgtgaacattgtccatgtcttttccaatttttaaaatcttttgtagggcctcaatcaattcccctaactctttagttttctttgtcttttcacttacagtcaaatctgtattagatatgacttgtacaatttctttttcaagtcattgatttgatcattgatgattttatcgttcccagtatcgttatcatcaacaacggcgacgctaccatgttggaatttggagccttctgcgtccatggtaatgatagacatcattaagttatagatacttgttatgtttttgtattaaatacctgtacatatttattatatagtgtattcagtatacattcttttatttactttaagttttcttttaaagtttttcatttcttttcaaatcttcgaaagacatatttggtgacaattaaaatgttttcctgatattatgtacatccgtacaccacataatatatagaaaaactaattaaaaataattcttatgaaaatgacagtaataaactctcattttccaacaa
